(19) United States
(12) Patent Application Publication
(10) Pub. No.: US 2020/0222519 A1
(43) Pub. Date: Jul. 16, 2020

(54) A UNIVERSAL VACCINE BASED ON SHARED TUMOR NEOANTIGENS FOR PREVENTION AND TREATMENT OF MICRO SATELLITE INSTABLE (MSI) CANCERS

(71) Applicant: NOUSCOM AG, Basel (CH)

(72) Inventors: Alfredo NICOSIA, Naples (IT); Elisa SCARSELLI, Rome (IT); Guido LEONI, Rome (IT); Armin LAHM, Rom (IT)

(21) Appl. No.: 16/626,458

(22) PCT Filed: Jul. 12, 2018
(86) PCT No.: PCT/EP2018/069032

§ 371 Date: Dec. 24, 2019

(30) Foreign Application Priority Data
Jul. 12, 2017 (EP) 17181026.0

(51) Int. Cl. A61K 39/00; C07K 14/47; G16B 20/00

(52) U.S. Cl. CPC A61K 39/0011; A61K 2039/5152; G16B 20/00; C07K 14/4748

(57) ABSTRACT

This invention relates to a method of selecting a collection of frame-shift peptides (CFSPs) to produce a universal cancer vaccine peptide collection (CVP) for prophylaxis and treatment of patients with hereditary and sporadic micro-satellite instability (MSI) tumors. This invention relates as well to a method of producing a CVP by selecting a subset of frame-shift peptides (FSPs) from the CFSP and optionally modifying the FSP's amino acid (aa) sequence to generate modified FSPs (mFSPs). The invention further relates to nucleic acid collections encoding a CVP of FSPs and/or mFSPs in one or more vaccine vectors that can be used also simultaneously. These CVPs, nucleic acids and vectors are used for the prophylaxis or treatment of MSI cancers.

[0001] This invention relates to a method of selecting a collection of frame-shift peptides (CFSPs) to produce a universal cancer vaccine peptide collection (CVP) for prophylaxis and treatment of patients with hereditary and sporadic micro-satellite instability (MSI) tumors. This invention relates as well to a method of producing a CVP by selecting a subset of frame-shift peptides (FSPs) from the CFSP and optionally modifying the FSP's amino acid (aa) sequence to generate modified FSPs (mFSPs). The invention further relates to nucleic acid collections encoding a CVP of FSPs and/or mFSPs in one or more vaccine vectors that can be used also simultaneously. These CVPs, nucleic acids and vectors are used for the prophylaxis or treatment of MSI cancers.

### BACKGROUND OF THE INVENTION

[0002] The field of cancer vaccines has focused for a long time on targeting tumor-associated and, more recently, tumor-specific antigens. The latter can arise in cancer cells from oncogenic viral proteins or somatic mutations in coding genes leading to the production of tumor neoantigens, defined as such because not present in normal cells. While being more appealing for the lower risk of self-tolerance and autoimmunity, tumor neoantigens vary significantly among the cancerous cells of a given patient and across the human population, hampering the development of an effective universal cancer vaccine based on shared tumor neoantigens.

[0003] There is however a group of cancers that does not follow this general rule due to its underlying biology: microsatellite instable (MSI) tumors frequently caused by mutations in DNA mismatch repair genes (MMR). A defective MMR system leads to accumulation of mutations in regions of repetitive nucleotide sequences called microsatellites. Mutations at microsatellites of coding genes can lead to a shift of the translational reading frame resulting in chimeric proteins whose C-terminus is composed of a novel non-self peptide, a so-called frame shift peptide (FSP). Unlike most cancers, mutations in MSI tumors arise preferentially in microsatellites consisting of mononucleotide repeats (MNRs). Within coding regions, such mutations mostly consist of a 1 nucleotide deletion and affect a limited number of genes, being therefore shared among patients (Kim, T. M., et al. (2013) Cell 155(4): 858-868).

[0004] Hence, MSI-associated cancers offer a unique opportunity to design a universal vaccine based on shared tumor neoantigens. MSI-tumors include both sporadic and inherited cancers caused by somatic and germline mutations in MMR genes, respectively. The Lynch syndrome (LS) is a rare disease (ORPHA144) that falls in the second group. In particular, individuals with heterozygous germline mutations in either MSH2 or MLH1 genes of the MMR pathway (˜90% of genetic LS carriers) are at higher risk for cancer development. Specifically, they are predisposed to develop colon or endometrial cancer in >50% of cases during their lifespan (Boland, C. R. and A. Goel (2010) Gastroenterology 138(6): p. 2073-2087 e3).

[0005] In summary, the invention described here relates to the identification of shared FSP neoantigens across MSI tumors and to the development of a universal vaccine based on a subset of FSPs and modified FSPs (defined as CVP) derived from a CFSP for treatment of MSI cancers and for their prevention, particularly in LS carriers. These CVP may provide inter alia the following advantages: (i) good therapeutic and/or prophylactic immune responses for a large variety of MSI cancers; (ii) an off-the-shelf vaccine that is ready to use and effective in a large cohort of patients because it encodes a large set of shared FSPs; (iii) a particular CVP can be selected in such a way to be suitable for treatment and prophylaxis of any MSI cancer, this is particularly useful in a prophylactic setting; (iv) no risk of autoimmune responses due to the exclusion of potential self-epitopes.

[0006] To the best knowledge of the inventors, the methods of the invention are characterized by various features unknown before, including:
[0007] (i) A variety of safeguards, such as
   [0008] a) selecting frameshift peptides from a gene which is, on average, expressed above a threshold in the selected tumor type,
   [0009] b) selecting frameshift peptides that are absent or very rare in tissue of healthy subjects,
   [0010] c) excluding segments from frameshift peptides which are identical to segments with length 8 amino acids or more in normal human proteins, and
   [0011] c) using a large number of cancer samples.
[0012] (ii) The inclusion of frameshift peptides with a length shorter than that of a minimal putative CD8+ T cell epitope (8mer). This is achieved by the addition of up to 4 wildtype amino acids to generate a peptide of at least 8 amino acids.
[0013] (iii) The selection of an optimal collection of frameshift peptides to be included in the vaccine such that each individual cancer sample (cancer samples represent the population targeted by the vaccine) contains a portion of the frameshift peptides encoded by the vaccine and the total length of the frameshift peptides represented in this portion is at least 400 amino acids. Clinical trials on vaccines targeting viral antigens have shown that, on average, 400 amino acid of viral antigen, i.e. non-self antigens just like frameshift peptides, is needed to generate at least 1 immunogenic T cell response in each patient. Although for each cancer sample the portion of frameshift peptides covered will be different (i.e. each cancer sample contains a different subset of frameshift mutations and, consequently, a different subset of frameshift peptides out of the optimal collection will be present), the optimal collection is selected in such a way that the fraction of frameshift peptides covered in each tumor sample will have a total length of at least 400 amino acids. Incorporating this 400 amino acid rule into the disclosed selection method thus ensures induction of T cells agaist FSP present in tumors of the vaccine target population.

### SUMMARY OF THE INVENTION

[0014] In a first aspect, the present invention relates to a method of selecting a collection of frame-shift peptides (CFSP) for producing a universal micro-satellite instability (MSI) cancer vaccine peptide collection (CVP) for prophylaxis or treatment of a patient with a cancer comprising hereditary and sporadic MSI cancer or being at risk of developing such a cancer, comprising the steps of:
[0015] (i) selecting a collection of nucleic acids (CFSM), each comprising a frame-shift mutation (FSM), each FSM being present in one or more of at least M cancer samples (CS), each of a different patient, wherein the cancer of the patient comprises cancer cells with an MSI phenotype;
   [0016] wherein at least 50% of the FSM that are selected fulfill criteria (a), (b), (c) and/or (d):
   [0017] (a) the FSM is present in a mononucleotide repeat (MNR) of coding genes with a length equal to or longer than 6 nucleotides;
   [0018] (b) the FSM corresponds to a deletion of 1 nucleotide;
   [0019] (c) the number of DNA sequencing reads harboring the FSM is significantly higher in the tumor sample as compared to the matched normal sample (FDR-corrected Fisher test p-value equal to or lower than 0.05);
   [0020] (d) the FSM is present in the matched normal samples with an allele frequency lower than 25%,
[0021] (ii) selecting X different frame-shift peptides (FSPs), wherein each selected FSP is the complete translation product of the protein-encoding segment of a nucleic acid comprising a FSM of the CFSM of at least 4 amino acid length, starting from the codon encoding the first amino acid that is different relative to the translation product of the corresponding wild type (wt) nucleic acid without the FSM,
   wherein X is at least 20 more preferably at least 35 and M is at least 5.

[0022] In a second aspect, the present invention relates to a method of determining the amino acid sequences of peptides comprised in a CVP or of the nucleic acid sequences encoding the peptides comprised in the CVP, comprising the steps of:
[0023] (a) selecting at least Y FSPs or at least 8 amino acid long fragments thereof from the CFSP selected according to the first aspect of the invention;
[0024] (b) modifying the amino acid sequence of one or more or of all of those FSPs which fulfill the following criteria: (i) the FSP has a length of between 4 to 9 amino acids, and/or (ii) the FSP contains one or more identical contiguous stretches of 8 or more amino acids present in more than one FSP encoded by the same FSM and/or (iii) the FSP contains one or more contiguous stretches of 8 or more amino acids also present in wt human proteins,
   wherein the amino acid sequence of an FSP according to (i) is modified by adding to the N-terminus of the FSP between 1 to 4 amino acids of the wild type (wt) amino acid sequence present immediately upstream of the FSP and wherein the modified FSP (mFSP) has a length of at least 8 amino acids; the amino acid sequence of a FSP according to (ii) is modified by removing these contiguous stretches from all but the longest FSP with the proviso that FSPs with a length of less than 4 amino acids after removal of the contiguous stretch are excluded from the CVP; and/or the amino acid sequence of a FSP according to (iii) is modified by removing these stretches; modified FSPs with a length of less than 4 amino acids after removal of the contiguous stretch are excluded from the CVP, and
   wherein the amino acid sequences of the CVP comprises the amino acid sequences of the FSPs or fragments thereof selected in step a) and/or modified in step (b);
   and wherein Y is at least 20 more preferably at least 35

[0025] In a third aspect, the present invention relates to a method of producing a CVP or a collection of nucleic acids encoding the CVP comprising the steps of
[0026] (i) obtaining the amino acid or nucleic acid sequence information determined in the method of the second aspect of the invention; and
[0027] (ii) synthesizing the amino acid sequence of the CVP in one or more polypeptides or a collection of nucleic acids with that sequence and optionally inserting the collection of nucleic acids into one or more expression cassettes and/or a collection of expression vectors.

[0028] In a fourth aspect, the present invention relates to a CVP or a collection of nucleic acids encoding the peptides of said CVP producible by the method of the third aspect of the invention.

[0029] In a fifth aspect, the CVP comprising or consisting of Y different FSPs and/or mFSPs, wherein each FSP or the FSP which is modified to mFSP is a fragment of or the complete translation product of the protein-encoding segment of a FSM containing nucleic acid starting from the codon encoding the first amino acid that is different relative to the translation of the corresponding wt nucleic acid without the FSM of in either case at least 4 amino acid length and wherein at least 50% of the FSPs or the FSPs which are modified to mFSPs fulfill one or more of the following criteria:
[0030] (a) the FSP is encoded by a FSM that is observed with a cancer type-specific frequency (CF) observed for a subset of CS of a specific type of cancer that are part of a collection of M different CS that is at least 5% for at least one of the cancer types present in the CS; and/or
[0031] (b) the average mRNA expression level of the gene with the FSM encoding the FSP is in the top 80^{th} percentile of the distribution describing the average mRNA expression values of each protein-encoding gene across the CS; and/or
[0032] (c) the FSM generating the FSP is observed in less than 2% in normal tissues in a cohort of subjects without a cancer
   wherein the amino acid sequence of one or more or all those FSPs which fulfill the following criteria: (i) the FSP has a length of between 4 to 9 amino acids, and/or (ii) the FSP contains one or more identical contiguous stretches of 8 or more amino acids present in more than one FSP encoded by the same FSM and/or (iii) the FSP contains one or more contiguous stretches of 8 or more amino acids also present in wt human proteins,
   is modified for a FSP according to (i) by adding to the N-terminus of the FSP between 1 to 4 amino acids of the wild type (wt) amino acid sequence present immediately upstream of the FSP and wherein the modified FSP (mFSP) has a length of at least 8 amino acids; for a FSP according to (ii) is modified by removing these contiguous stretches from all but the longest FSP with the proviso that FSPs with a length of less than 4 amino acids after removal of the contiguous stretch are excluded from the CVP; and/or for a FSP according to (iii) is modified by removing these stretches; modified FSPs with a length of less than 4 amino acids after removal of the contiguous stretch are excluded from the CVP;
   and wherein Y is at least 20 and more preferably at least 35 and M is at least 5.

[0033] In a sixth aspect, the present invention relates to a nucleic acid collection encoding the CVP of the fifth aspect of the present invention.

[0034] In a seventh aspect, the present invention relates to a collection of one or more expression vectors, each comprising all or part of the nucleic acid collection of the fourth or sixth aspect of the present invention, wherein the entirety of the collection of expression vectors comprise all of the nucleic acid collection of the fourth or sixth aspect of the present invention.

[0035] In an eighth aspect, the present invention relates to a CVP of the fourth or fifth aspect of the present invention, a nucleic acid collection of the fourth or sixth aspect of the present invention, an expression vector collection of the seventh aspect of the present invention, for use in prophylaxis or treatment of a patient with a cancer comprising cancer cells with an MSI phenotype or being at risk of developing such cancer, wherein the cancer is preferably selected from the group consisting of colorectal cancer, gastric cancer, endometrial cancer, small intestine cancer, hepatobiliary tract cancer, liver cancer, neuroendocrine cancers, cervical cancer, ovarian cancer, uterine sarcomas, brain cancer and skin cancer

[0036] In an eight aspect, the present invention relates to a nucleic acid collection of the fourth or sixth aspect of the present invention and/or a expression vector collection of the seventh aspect of the present invention for use in prophylaxis or treatment of a patient with a cancer comprising cancer cells with an MSI phenotype or being at risk of developing such cancer, wherein the nucleic acid collection and/or the expression vector collection is administered in a heterologous prime-boost vaccination scheme, preferably the prime is with an adenovirus vector and one or more boosts are with an MVA vector.

### FIGURE LEGENDS

[0037] FIG. 1: Antigen length determines the number of vaccine-induced immunogenic epitopes.

[0038] FIG. 2: Immunogenic coverage of Nous-209 in MSI cell lines.

[0039] FIG. 3: Immunogenic coverage of Nous-209 in MSI CRC biopsies.

[0040] FIG. 4: Number of predicted MHC-I binding epitopes arising from Nous-209 in biopsies of MSI patients.

[0041] FIG. 5: The FSP corresponding to SEQ ID NO: 123 included in Nous-209 is immunogenic in vivo in HLA.A02 transgenic mice. A representative CD8 T cell response in 5 animals to a HLA-A02 nonamer present in FSP SEQ ID NO: 123, as measured by intracellular staining (ICS) for interferon γ (IFN-γ) (panel A). FACS plot of gating strategy for IFN-γ+ CD8 T cells from one of those mice showing a significant percentage (5.6%) of FSP-reactive T cells (panel B).

[0042] FIG. 6: Disorder profiles predicted by IUPRED for the eight artificial polypeptides containing Nous-209 FSPs in layout A and B.

[0043] FIG. 7: Schematic view of the expression cassettes.

[0044] FIG. 8: Immunogenicity of GAd20-209-FSPs/MVA-209-FSPs prime/boost regimen in mice. IFNγ ELISpot responses are measured 2 weeks post GAd20-209-FSPs prime(GAd) and one-week post MVA-209-FSPs boost (GAd/MVA). Shown are the responses (number of T cells producing IFNγ per millions of splenocytes) to 16 pools of synthetic peptides (P1-P16) covering the polypeptide sequences of the 209 FSPs encoded by the vaccines.

[0045] FIG. 9: Measurement of immune responses against each of the 16 pools covering the 209 FSP sequences. IFNγ ELISpot responses measured post boost on splenocytes of mice vaccinated with GAd20-209-FSPs/MVA-209-FSPs. Shown are the responses (number of T cells producing IFNγ per millions of splenocytes) to each of the 16 pools of synthetic peptides (from P1 to P16) covering the polypeptide sequences of the 209 FSPs encoded by the vaccine.

[0046] FIG. 10: Vaccine-induced immune responses against FSPs encoded by a single vector are not affected by vectors co-administration. IFNγ ELISpot responses are measured post prime (week2, gray bars) and post boost (week3, black bars) in mice immunized with a vector mixture or with single vectors. Shown are the responses (number of T cells producing IFNγ per millions of splenocytes) to the 4 pools of synthetic peptides (P1-P4) covering the sequences of the FSPs encoded by the vector FSPA1 (A) and to the 4 pools of synthetic peptides (P5-P8) covering the sequences of the FSPs encoded by the vector FSPA2 (B). Statistics are calculated by non-parametric Mann-Whitney U test (ns=p>0.05).

[0047] FIG. 11: The FSP corresponding to SEQ ID NO: 123 (FSP-peptide) included in Nous-209 is immunogenic in vivo in HLA.A02 transgenic mice. A) Percentage of IFNγ+ CD8+ FSP-specific T cells responses and responses observed for the DMSP control. B) FACS plot of gating strategy for IFN-γ+CD8 T cells from one representative mouse sample for the DMSO control (top) and the FSP peptide (bottom).

### DETAILED DESCRIPTION OF THE INVENTION

[0048] Before the present invention is described in detail below, it is to be understood that this invention is not limited to the particular methodology, protocols and reagents described herein as these may vary. It is also to be understood that the terminology used herein is for the purpose of describing particular embodiments only, and is not intended to limit the scope of the present invention which will be limited only by the appended claims. Unless defined otherwise, all technical and scientific terms used herein have the same meanings as commonly understood by one of ordinary skill in the art.

[0049] Preferably, the terms used herein are defined as described in “A multilingual glossary of biotechnological terms: (IUPAC Recommendations)”, Leuenberger, H. G. W, Nagel, B. and Klbl, H. eds. (1995), Helvetica Chimica Acta, CH-4010 Basel, Switzerland) and as described in “Pharmaceutical Substances: Syntheses, Patents, Applications” by Axel Kleemann and Jurgen Engel, Thieme Medical Publishing, 1999; the “Merck Index: An Encyclopedia of Chemicals, Drugs, and Biologicals”, edited by Susan Budavari et al., CRC Press, 1996, and the United States Pharmacopeia-25/National Formulary-20, published by the United States Pharmcopeial Convention, Inc., Rockville Md., 2001.

[0050] Throughout this specification and the claims which follow, unless the context requires otherwise, the word “comprise”, and variations such as “comprises” and “comprising”, will be understood to imply the inclusion of a stated feature, integer or step or group of features, integers or steps but not the exclusion of any other feature, integer or step or group of integers or steps. In the following passages different aspects of the invention are defined in more detail. Each aspect so defined may be combined with any other aspect or aspects unless clearly indicated to the contrary. In particular, any feature indicated as being preferred or advantageous may be combined with any other feature or features indicated as being preferred or advantageous.

[0051] Several documents are cited throughout the text of this specification. Each of the documents cited herein (including all patents, patent applications, scientific publications, manufacturer's specifications, instructions, etc.), whether supra or infra, are hereby incorporated by reference in their entirety. Nothing herein is to be construed as an admission that the invention is not entitled to antedate such disclosure by virtue of prior invention.

### Definitions

[0052] In the following, some definitions of terms frequently used in this specification are provided. These terms will, in each instance of its use, in the remainder of the specification have the respectively defined meaning and preferred meanings.

[0053] As used herein, the term “isolated” refers to a molecule which is substantially free of other molecules with which it is naturally associated with. In particular, isolated means the molecule is not in an animal body or an animal body sample. An isolated molecule is thus free of other molecules that it would encounter or contact in an animal. Isolated does not mean isolated from other components associated with as described herein, e.g. not isolated from other components of a composition the molecule is comprised in, or isolated from a vector or cell it is comprised in.

[0054] The terms “polynucleotide” and “nucleic acid” are used interchangeably herein and are understood as a polymeric or oligomeric macromolecule made from nucleotide monomers. Nucleotide monomers are composed of a nucleobase, a five-carbon sugar (such as but not limited to ribose or 2′-deoxyribose), and one to three phosphate groups. Typically, a nucleic acid is formed through phosphodiester bonds between the individual nucleotide monomers. In the context of the present invention preferred nucleic acid molecules include but are not limited to ribonucleic acid (RNA), modified RNA, deoxyribonucleic acid (DNA), and mixtures thereof such as e.g. RNA-DNA hybrids. The nucleic acids, can e.g. be synthesized chemically, e.g. in accordance with the phosphotriester method (see, for example, Uhlmann, E. & Peyman, A. (1990) Chemical Reviews, 90, 543-584).”

[0055] The term “open reading frame” abbreviated “ORF” is used in the context of the present invention to refer to a sequence of nucleotides that can be translated into a consecutive string of amino acids. Typically, an ORF contains a start codon, a subsequent region usually having a length which is a multiple of 3 nucleotides, but does not contain a stop codon (TAG, TAA, TGA, UAG, UAA, or UGA) in the given reading frame. An ORF codes for a protein where the amino acids into which it can be translated form a peptide-linked chain.

[0056] As used herein, the term “protein”, “peptide”, “polypeptide”, “peptides” and “polypeptides” are used interchangeably throughout. These terms are used in the context of the present invention to refer to both naturally occurring peptides, e.g. naturally occurring proteins and synthesized peptides that may include naturally or non-naturally occurring amino acids. Peptides can be also chemically modified by modifying a side chain or a free amino or carboxy-terminus of a natural or non-naturally occurring amino acid. This chemical modification includes the addition of further chemical moieties as well as the modification of functional groups in side chains of the amino acids, such as a glycosylation. A peptide is a polymer preferably having at least 3, 4, 5, 6, 7, 8, 9, 10, 15, 20, 25, 30, 35, 40, 45, 50, 55, 60, 65, 70, 75, 80, 85, 90, 95, or at least 100 amino acids, most preferably at least 8 or at least 30 amino acids.

[0057] The term “frame-shift mutation” abbreviated as “FSM” is used in the context of the present invention to refer to an alteration of the nucleic acid sequence within the ORF encoding a protein, which leads to an alteration of the reading frame downstream of the mutation and, thus to a protein with an altered sequence in comparison to the wild-type protein. A frame-shift mutation results, if a number of nucleotides is inserted or deleted in an ORF that cannot be divided by 3. Typically, FSM result if one or two nucleotides are deleted or inserted. Deletions are more frequent than insertions. If one or two nucleotides are deleted within the codon of an ORF an altered codon will be formed with one or two nucleotides 3′ of the affected codon. Unless this altered codon is a stop codon the translation product of the ORF will be determined by the altered codon and an alternate ORF 3′ of the altered codon up to the next stop codon. If one or two nucleotides are inserted into a codon a new codon is generated that will comprise two or one nucleotides of the previous nucleotides and one or two of the inserted nucleotides. Unless this new codon is a stop codon the translation product of the ORF will be determined by the new codon and an alternate ORF 3′ of the new codon up to the next stop codon.

[0058] The term “frame-shift codon” abbreviated as “FC” is used in the context of the present invention to refer to the first codon at the 3′ of the FSM that encodes a different amino acid compared to the wt sequence.

[0059] The term “collection of nucleic acids comprising FSMs” abbreviated as “CFSM” is used in the context of the present invention to refer to a list of separate nucleotide sequences each including a FSM that may represent all FSMs observed in a particular MSI cancer type, e.g. colorectal, endometrial or gastric cancer or two or more MSI cancers or a subgroup of FSMs that is selected according to one or more of the criteria outlined in detail below.

[0060] The term “frame-shift peptide” abbreviated as “FSP” is used in the context of the present invention to refer to the complete translation product of the protein-encoding segment of a nucleic acid comprising a FSM of an CFSM starting from the FC.

[0061] The term “a collection of frame-shift peptides” abbreviated as “CFSP” is used in the context of the present invention to refer to a list of amino acid sequences of FSP may represent all FSPs observed in a particular MSI cancer type, e.g. colorectal, endometrial or gastric cancer or two or more MSI cancers or a subgroup of FSPs that is selected according to one or more of the criteria outlined in detail below.

[0062] The term “modified FSP” abbreviated as “mFSP” is used in the context of the present invention to refer to a peptide having an amino acid sequence that is based on a FSP but that is modified compared to the FSP by addition or deletion of amino acids to render that particular FSP more suitable for inclusion into a collection of peptides that form a cancer vaccine peptide collection. The criteria for selecting FSPs that may benefit from modification and the particular modification are outlined in detail below.

[0063] The term “cancer vaccine peptide collection” abbreviated as “CVP” is used in the context of the present invention to refer to FSPs and/or mFSPs either in the form of individual peptides or as linked to each other. Preferably, two or more different FSPs and/or mFSPs are linked to each other by peptide bonds forming polypeptides. The linkage may be directly or through one or more linker amino acids, e.g. small flexible amino acids like Gly, Ser, or Ala. In order to avoid the generation of further antigens its it preferred that the peptides are linked directly to each other. It is preferred to link the FSPs and/or mFSPs together to form polypeptides. It is known that the translation efficiency of very long mRNAs decreases and, therefore it is preferred that CVPs comprising FSPs and mFSPs of a total length of more than 1.000 amino acids, more preferably of more than 1.500 amino acids are split into separate polypeptides. E.g. if the CVP comprises FSPs and/or mFSPs of about 6.000 amino acid than it is preferred that the FSPs and/or mFSPs are linked to form four separate polypeptides each comprising FSPs and/or mFSPs of a total length of about 1.500 amino acids.

[0064] The term “microsatellite instability” abbreviated as “MSI” is defined as alterations in the length of microsatellites due to the deletion or insertion of one or more repeat units in the microsatellite regions. This generates novel microsatellite alleles with altered total length in the genomic DNA of the tumor cells when compared with the genomic DNA in normal/germline cells from the same individual. This condition of genetic hypermutability results from impaired DNA mismatch repair (MMR). MMR is a mechanism that corrects spontaneous mutations that occur in genomic DNA during DNA replication. Typically, the mutations are single base mismatches of short nucleotide insertions or deletions. The latter two may result in a frameshift mutation if occurring in an ORF and if the length of the inserted or deleted nucleotide sequence is not dividable by three (see above definition of FSM).

[0065] The term “MSI phenotype” refers to the diagnosis of a change in the length of repeated nucleotides, most often GT/CA repeats. Such repeats occur throughout the genomic DNA of healthy subjects and make up about 3% of the human genome. The skilled person is well aware how to determine MSI phenotype in a sample. A preferred way is the use of a Promega (Madison, Wis.) MSI Analysis System (v 1.2), comprehensive of 7 markers, according to the guidelines established during the National Cancer Institute (NCI) Workshop on Microsatellite Instability.

[0066] The term “neo-epitope” is used in the context of the present invention to refer to an epitope encoded by the tumor that is not present in normal/germline cells but occurs in precancerous and/or, cancerous cells, in particular having an MSI phenotype.

[0067] The term “expression cassette” is used in the context of the present invention to refer to a nucleic acid molecule which comprises at least one nucleic acid sequence that is to be expressed, e.g. a nucleic acid encoding the CVP of the present invention or a part thereof, operably linked to transcription and translation control sequences. Preferably, an expression cassette includes cis-regulating elements for efficient expression of a given gene, such as promoter, initiation-site and/or polyadenylation-site. Preferably, an expression cassette contains all the additional elements required for the expression of the nucleic acid in the cell of a patient. A typical expression cassette thus contains a promoter operatively linked to the nucleic acid sequence to be expressed and signals required for efficient polyadenylation of the transcript, ribosome binding sites, and translation termination. Additional elements of the cassette may include, for example enhancers. An expression cassette preferably also contains a transcription termination region downstream of the structural gene to provide for efficient termination. The termination region may be obtained from the same gene as the promoter sequence or may be obtained from a different gene.

[0068] The term “operably linked” as used in the context of the present invention refers to an arrangement of elements, wherein the components so described are configured so as to perform their usual function. A nucleic acid is “operably linked” when it is placed into a functional relationship with another nucleic acid sequence. For example, a promoter is operably linked to one or more transgenes, if it affects the transcription of the one or more transgenes. Further, control elements operably linked to a coding sequence are capable of effecting the expression of the coding sequence. The control elements need not be contiguous with the coding sequence, so long as they function to direct the expression thereof. Thus, for example, intervening untranslated yet transcribed sequences can be present between a promoter sequence and the coding sequence and the promoter sequence can still be considered “operably linked” to the coding sequence.

[0069] The term “expression vector” refers to a polynucleotide or a mixture of a polynucleotide and proteins capable of being introduced or of introducing the collection of nucleic acids of the present invention or one nucleic acid that is part of the collection of nucleic acids of the invention into a cell, preferably a mammalian cell. Examples of vectors include but are not limited to plasmids, cosmids, phages, viruses or artificial chromosomes. In particular, a vector is used to transport the promoter and the collection of the nucleic acids or one nucleic acid that is part of the collection of nucleic acids of the invention into a suitable host cell. Expression vectors may contain “replicon” polynucleotide sequences that facilitate the autonomous replication of the expression vector in a host cell. Once in the host cell, the expression vector may replicate independently of or coincidental with the host chromosomal DNA, and several copies of the vector and its inserted DNA can be generated. In case that replication incompetent expression vectors are used—which is often the case for safety reasons—the vector may not replicate but merely direct expression of the nucleic acid. Depending on the type of expression vector the expression vector may be lost from the cell, i.e only transiently expresses the CVP encoded by the nucleic acid or may be stable in the cell. Expression vectors typically contain expression cassettes, i.e. the necessary elements that permit transcription of the nucleic acid into an mRNA molecule.

[0070] The term “antigen” is used in the context of the present invention to refer to any structure recognized by molecules of the immune response, e.g. antibodies, T cell receptors (TCRs) and the like. Preferred antigens are cellular proteins that are associated with a particular disease. Antigens are recognized by highly variable antigen receptors (B-cell receptor or T-cell receptor) of the adaptive immune system and may elicit a humoral or cellular immune response. Antigens that elicit such a response are also referred to as immunogen. A fraction of the proteins inside cells, irrespective of whether they are foreign or cellular, are processed into smaller peptides and presented to by the major histocompatibility complex (MHC). A cellular immune response is elicited, if the small peptide fragment is bound by a T-cell receptor.

[0071] The term “epitope”, also known as antigenic determinant, is used in the context of the present invention to refer to the segment of an antigen, preferably peptide that is bound by molecules of the immune system, e.g. B-cell receptors, T-cell receptors or antibodies. The epitopes bound by antibodies or B cells are referred to as “B cell epitopes” and the epitopes bound by T cells are referred to as “T cell epitopes”. In this context, the term “binding” preferably relates to a specific binding, which is defined as a binding with an association constant between the antibody or T cell receptor (TCR) and the respective epitope of 1×10\hat{ }5 M-1 or higher, preferably of 1×10\hat{ }6 M-1, 1×10\hat{ }7 M-1, 1×10¹\8 M-1 or higher. The skilled person is well aware how to determine the association constant (see e.g. Caoili, S. E. (2012) Advances in Bioinformatics Vol. 2012). Preferably, the specific binding of antibodies to an epitope is mediated by the Fab (fragment, antigen binding) region of the antibody, specific binding of a B-cell is mediated by the Fab region of the antibody comprised by the B-cell receptor and specific binding of a T-cell is mediated by the variable (V) region of the T-cell receptor. T cell epitopes are presented on the surface of an antigen presenting cell, where they are bound to Major Histocompatiblilty (MHC) molecules. There are at least three different classes of MHC molecules termed MHC class I, II and III molecules, respectively. Epitopes presented through the MHC-I pathway elicit a response by cytotoxic T lymphocytes (CD8+ cells), while epitopes presented through the MHC-II pathway elicit a response by T-helper cells (CD4+ cells). T cell epitopes presented by MHC Class I molecules are typically peptides between 8 and 11 amino acids in length and T cell epitopes presented by MHC Class II molecules are typically peptides between 13 and 17 amino acids in length. MHC Class III molecules also present non-peptidic epitopes such as glycolipids. Accordingly, the term “T cell epitope” preferably refers to a 8 to 11 or 13 to 17 amino acid long peptide that can be presented by either a MHC Class I or MHC Class II molecule. Epitopes usually consist of chemically active surface groupings of amino acids, which may or may not carry sugar side chains and usually have specific three-dimensional structural characteristics, as well as specific charge characteristics. Conformational and non-conformational epitopes are distinguished in that the binding to the former but not the latter is lost in the presence of denaturing solvents.

[0072] The term “junctional epitope” as used in the context of the present invention refers to an epitope that is not present in an isolated FSP, mFSP and/or antigenic fragment thereof of a given CVP but comprises an amino acid sequence formed upon linking two peptides, e.g. two FSPs by a peptide bond. For example, a list of all potential junction epitopes of the assembled peptides with 8 consecutive amino acids may be created wherein 1 to 7 amino acids of the first peptide and 7 to 1 amino acids from the second peptide are included encompassing the linking peptide bond. This list is then compared to the amino acid sequence of all FSPs and mFSPs of the CVP in order to identify all potential junctional epitopes.

[0073] The term “non-MSI cancer epitope” refers to an epitope of a protein that is specifically expressed in cancer cells but which is not due to a FSM. Such an epitope is considered specific if it is at least 10-fold more abundant in cancer cells than in healthy cells. Examples of such epitopes are proteins whose expression is upregulated in cancer cells like, e.g. tyrosinase in melanomas or Her-2 receptor in breast cancer, or that are mutated in certain cancers like e.g. p53.

[0074] The term “immunogenic coverage” refers to the expected number of immunogenic epitopes that the vaccine is likely to elicit in a patient. A vaccine encoding a set of FSPs that are present in a patient's tumor for a cumulative length of 400 amino acids is expected to elicit on average 3 immunogenic epitopes and is providing good immunogenic coverage.

[0075] The term “an antigenic fragment thereof” as used in the context of the present invention refers to a fragment of an antigen, preferably a FSP or mFSP, wherein the fragment is also antigenic, i.e. is capable of eliciting a B and/or T cell immune response in a mammal. Preferably the antigenic “fragments of FSPs and/or mFSPs” are at least 8 amino acid long continuous stretches of the FSPs and mFSPs as defined above and in more detail below. Fragments of a mFSP comprises at least 4 amino acids of the FSP on which the mFSP is based.

[0076] The term “collection of nucleic acids encoding the CVP” is used in the context of the present invention to refer to one or more consecutive nucleic acid sequences encoding a polypeptide comprising all FSPs and/or mFSPs or antigenic fragments thereof of the CVP, encoding 2, 3, 4, 5, 6, 7, 8, 9, or 10 or more, preferably four polypeptides comprising all FSPs and/or mFSPs of the CVP. Thus, the term comprises in one embodiment a single nucleic acid encoding the CVP and in the other most extreme embodiment the collection of nucleic acid comprises a separate nucleic acid for each FSP and/or mFSP or antigenic fragment thereof.

[0077] The terms “preparation” and “composition” as used in the context of the present invention are intended to include the formulation of the active compound, e.g. the VLPs of the present invention with a carrier and/or excipient.

[0078] “Pharmaceutically acceptable” as used in the context of the present invention means approved by a regulatory agency of the Federal or a state government or listed in the U.S. Pharmacopeia or other generally recognized pharmacopeia for use in animals, and more particularly in humans.

[0079] The term “carrier”, as used herein, refers to a pharmacologically inactive substance such as but not limited to a diluent, excipient, surfactants, stabilizers, physiological buffer solutions or vehicles with which the therapeutically active ingredient is administered. Such pharmaceutical carriers can be liquid or solid. Liquid carrier include but are not limited to sterile liquids, such as saline solutions in water and oils, including but not limited to those of petroleum, animal, vegetable or synthetic origin, such as peanut oil, soybean oil, mineral oil, sesame oil and the like. Saline solutions and aqueous dextrose and glycerol solutions can also be employed as liquid carriers, particularly for injectable solutions. A saline solution is a preferred carrier when the pharmaceutical composition is administered intravenously. Examples of suitable pharmaceutical carriers are described in “Remington's Pharmaceutical Sciences” by E. W. Martin.

[0080] Suitable pharmaceutical “excipients” include starch, glucose, lactose, sucrose, gelatine, malt, rice, flour, chalk, silica gel, sodium stearate, glycerol monostearate, talc, sodium chloride, dried skim milk, glycerol, propylene, glycol, water, ethanol and the like.

[0081] “Surfactants” include anionic, cationic, and non-ionic surfactants such as but not limited to sodium deoxycholate, sodium dodecylsulfate, Triton X-100, and polysorbates such as polysorbate 20, polysorbate 40, polysorbate 60, polysorbate 65 and polysorbate 80.

[0082] “Stabilizers” include but are not limited to mannitol, sucrose, trehalose, albumin, as well as protease and/or nuclease antagonists.

[0083] “Physiological buffer solution” that may be used in the context of the present invention include but are not limited to sodium chloride solution, demineralized water, as well as suitable organic or inorganic buffer solutions such as but not limited to phosphate buffer, citrate buffer, tris buffer (tris(hydroxymethyl)aminomethane), HEPES buffer ([4 (2 hydroxyethyl)piperazino]ethanesulphonic acid) or MOPS buffer (3 morpholino-1 propanesulphonic acid). The choice of the respective buffer in general depends on the desired buffer molarity. Phosphate buffer are suitable, for example, for injection and infusion solutions.

[0084] The term “adjuvant” refers to agents that augment, stimulate, activate, potentiate, or modulate the immune response to the active ingredient of the composition at either the cellular or humoral level, e.g. immunologic adjuvants stimulate the response of the immune system to the actual antigen, but have no immunological effect themselves. Examples of such adjuvants include but are not limited to inorganic adjuvants (e.g. inorganic metal salts such as aluminium phosphate or aluminium hydroxide), organic adjuvants (e.g. saponins or squalene), oil-based adjuvants (e.g. Freund's complete adjuvant and Freund's incomplete adjuvant), cytokines (e.g. IL-1β, IL-2, IL-7, IL-12, IL-18, GM-CFS, and INF-γ) particulate adjuvants (e.g. immuno-stimulatory complexes (ISCOMS), liposomes, or biodegradable microspheres), virosomes, bacterial adjuvants (e.g. monophosphoryl lipid A, or muramyl peptides), synthetic adjuvants (e.g. non-ionic block copolymers, muramyl peptide analogues, or synthetic lipid A), or synthetic polynucleotides adjuvants (e.g polyarginine or polylysine).

[0085] An “effective amount” or “therapeutically effective amount” is an amount of a therapeutic agent sufficient to achieve the intended purpose. The effective amount of a given therapeutic agent will vary with factors such as the nature of the agent, the route of administration, the size and species of the animal to receive the therapeutic agent, and the purpose of the administration. The effective amount in each individual case may be determined empirically by a skilled artisan according to established methods in the art.

[0086] As used herein, “treat”, “treating”, “treatment” or “therapy” of a disease or disorder means accomplishing one or more of the following: (a) reducing the severity of the disorder; (b) limiting or preventing development of symptoms characteristic of the disorder(s) being treated; (c) inhibiting worsening of symptoms characteristic of the disorder(s) being treated; (d) limiting or preventing recurrence of the disorder(s) in an individual that has previously had the disorder(s); and (e) limiting or preventing recurrence of symptoms in individuals that were previously symptomatic for the disorder(s).

### Aspects of the Invention and Preferred Embodiments

[0087] In a first aspect, the present invention relates to a method of selecting a collection of frame-shift peptides (CFSP) for producing a universal micro-satellite instability (MSI) cancer vaccine peptide collection (CVP) for prophylaxis or treatment of a patient with a cancer comprising hereditary and sporadic MSI cancer or being at risk of developing such a cancer, comprising the steps of:
[0088] (i) selecting a collection of nucleic acids (CFSM) each comprising a frame-shift mutation (FSM) each FSM being present in one or more of at least M cancer samples (CS) each of a different patient, wherein the cancer of the patient comprises cancer cells with an MSI phenotype;
   [0089] wherein at least 50% of the FSM that are selected fulfill criteria (a), (b), (c) and/or (d):
   [0090] (a) the FSM is present in a mononucleotide repeat (MNR) of coding genes with a length equal to or longer than 6 nucleotides;
   [0091] (b) the FSM corresponds to a deletion of 1 nucleotide;
   [0092] (c) the number of DNA sequencing reads harboring the FSM is significantly higher in the tumor sample as compared to the matched normal sample (FDR-corrected Fisher test p-value equal to or lower than 0.05);
   [0093] (d) the FSM is present in the matched normal samples with an allele frequency lower than 25%,
[0094] (ii) selecting X different frame-shift peptides (FSPs), wherein each selected FSP is the complete translation product of the protein-encoding segment of a nucleic acid comprising a FSM of the CFSM of at least 4 amino acid length, starting from the codon encoding the first amino acid that is different relative to the translation product of the corresponding wild type (wt) nucleic acid without the FSM,
   wherein X is at least 20 more preferably at least 35 and M is at least 5.

[0095] By selecting a certain number and types of FSPs according to the method of the first aspect, induction of T cells against a number of FSP is ensured by the vaccination. The expected number of T cell immunogenic epitopes based on the 400 aa rule is at least one immunogenic epitope every 400aa and therefore at least 16 for a vaccine encoding for a total length of 6021aa. The inventors have indeed demonstrated in the mouse model that vaccination with 209 FSP for a total length of 6021 aa was able to induce a T cell response against at least 16 different FSP, corresponding to at least 1 every 376 aa (FIG. 9), this confirms the immunogenic rule. The selected vaccination platform based on genetic vectors, differently from peptide vaccination, ensured that the immunogenicity of an individual FSP is not suppressed by another FSP present in the vaccine. The inventors have demonstrated in a mouse model that competition is not occurring, by showing that administration of only one of the four vaccine vectors generates virtually identical responses compared to administration of a mix of four vaccine vectors.

[0096] In one embodiment, the FSPs selected in step (ii) can be described as candidate FSPs for producing a universal MSI CVP for prophylaxis or treatment of a patient with a cancer comprising hereditary and sporadic MSI cancer or being at risk of developing such a cancer. “Candidate” means that the FSPs potentially have a prophylactic or therapeutic effect. This can be expected based on the selection process and their structure.

[0097] The selection criterion (c) requires that the prevalence of a given FSM is significantly higher, i.e. more prevalent in the genomic DNA of one or more tumor samples than in matched normal samples from a healthy subject or healthy subjects. In this context the term “significantly higher” means that the prevalence of a given FSM relative to the prevalence of the wt un-mutated MNR is significantly higher in the tumor sample as compared to the normal sample according to a false-discovery-rate (FDR) corrected Fisher-test p-value equal to or smaller than 0.1, more preferably smaller than 0.05, more preferably smaller than 0.01 and even more preferably smaller than 0.005. The lower the value the more suited the FSM is for inclusion in the CFSM, since the likelihood of the stimulation of an unwanted immune reaction against healthy tissue decreases. This criterion is assessed by sequencing either genomic DNA or cDNA from the samples. It is preferred that 50% of the FSMs selected for the CFSM fulfill criterion (c), more preferably at least 60%, more preferably at least 70%, more preferably at least 80%, more preferably at least 90%, more preferably at least 95% and most preferably at least 100%.

[0098] While criterion (c) relates to the relative prevalence of a given FSM, criterion (d) relates to the absolute prevalence of a given FSM in the alleles of normal samples. It is preferred that the FSM selected for the CFSM has a low overall prevalence in the alleles of normal samples. Preferably, the allele frequency in normal samples is lower than 40%, more preferably lower than 35%, more preferably lower than 30%, more preferably lower than 25%, more preferably lower than 20% and even more preferably lower than 10%. It is preferred that 50% of the FSMs selected for the CFSM fulfill criterion (d), more preferably at least 60%, more preferably at least 70%, more preferably at least 80%, more preferably at least 90%, more preferably at least 95% and most preferably at least 100%.

[0099] It is preferred that the FSMs selected for the CFSM fulfill both criterions (c) and (d). It is preferred that 50% of the FSMs selected for the CFSM fulfill criterion (c) and (d), more preferably at least 60%, more preferably at least 70%, more preferably at least 80%, more preferably at least 90%, more preferably at least 95% and most preferably at least 100%. Preferably, at least 50% also fulfill criterions (a) and/or (b).

[0100] In another preferred embodiment the FSMs selected for the CFSM fulfill criterion (a). It is preferred that 50% of the FSMs selected for the CFSM fulfill criterion (a), more preferably at least 60%, more preferably at least 70%, more preferably at least 80%, more preferably at least 90%, more preferably at least 95% and most preferably at least 100%.

[0101] In another preferred embodiment the FSMs selected for the CFSM fulfill criterion (b). It is preferred that 50% of the FSMs selected for the CFSM fulfill criterion (b), more preferably at least 60%, more preferably at least 70%, more preferably at least 80%, more preferably at least 90%, more preferably at least 95% and most preferably at least 100%.

[0102] In another preferred embodiment the FSMs selected for the CFSM fulfill criterion (a), (c) and (d). It is preferred that 50% of the FSMs selected for the CFSM fulfill criterion (a), (c) and (d), more preferably at least 60%, more preferably at least 70%, more preferably at least 80%, more preferably at least 90%, more preferably at least 95% and most preferably at least 100%.

[0103] In another preferred embodiment the FSMs selected for the CFSM fulfill criterion (b), (c) and (d). It is preferred that 50% of the FSMs selected for the CFSM fulfill criterion (b), (c) and (d), more preferably at least 60%, more preferably at least 70%, more preferably at least 80%, more preferably at least 90%, more preferably at least 95% and most preferably at least 100%.

[0104] In another preferred embodiment the FSMs selected for the CFSM fulfill criterion (a), (b), (c) and (d). It is preferred that 50% of the FSMs selected for the CFSM fulfill criterion (a), (b), (c) and (d), more preferably at least 60%, more preferably at least 70%, more preferably at least 80%, more preferably at least 90%, more preferably at least 95% and most preferably at least 100%.

[0105] The method of the invention provides a CVP that is suitable to treat MSI cancer of not only a particular patient but of many different patients with MSI cancer, i.e. is a universal CVP for the treatment of MSI cancers. For the same reason, it will also be suitable to have a prophylactic effect against the development of MSI cancers. Accordingly, the selection of FSMs in the method of the present invention is not based on the analysis of a cancer sample from just one patient but uses the information of several cancer samples from different patients. To obtain an appropriate diversity at least 5 cancer samples (CS) of different patients are analyzed to determine FSMs. As outlined above, this is preferably done by whole genome sequencing, by exome sequencing or by sequencing cDNAs generated from mRNA isolated from the samples. Cancer samples are used from patients that have a MSI cancer. This may be ascertained by detecting an MSI phenotype in cells comprised in the cancer sample. The CS may be of the same MSI cancer, i.e. originate from the same tissue, or from two or more different MSI cancers. It is particularly preferred and provides a particularly broadly usable CVP if a CS of MSI cancers of two or more different MSI cancers are used in the selection process. Preferred MSI cancers from which samples are derived are colorectal cancer and gastric cancer, colorectal cancer and endometrial cancer, gastric cancer and endometrial cancer and gastric cancer, colorectal cancer and endometrial cancer.

[0106] The selection process outlined on the basis of the FSMs can also be carried out on the basis of the FSP encoded by a particular nucleic acid comprising a FSM, i.e. criterions (c) and (d) can also be assessed by comparing the respectively encoded amino acid sequences rather than the nucleic acid sequences. It is immediately apparent to the skilled person that the presence of a FSM in a cancer or normal sample can also be assessed by determining the number of the encoded protein amino acid sequence comprising a FSP at their C-terminus rather than the C-terminus of the wild-type protein sequence.

[0107] The present inventors further envision to select the FSPs that are included in the CFSP by using one or more of the following criteria:
[0108] (a) the FSP is encoded by a FSM that is observed with a cancer type-specific frequency (CF) observed for a subset of CS of a specific type of cancer that are part of the collection of M different CSs that is at least 5% for at least one of the cancer types present in the CS; and/or
[0109] (b) the average mRNA expression level of the gene with the FSM encoding the FSP is in the top 80^{th} percentile of the distribution describing the average mRNA expression values of each protein-encoding gene across the CS; and/or
[0110] (c) the FSM generating the FSP is observed in less than 2% in normal tissues in a cohort of subjects without a cancer.

[0111] Preferably, at least 50% of the FSPs included in the CFSP fulfill criterion (a), (b), (c), (a)+(b), (a)+(c), (b)+(c) or (a)+(b)+(c). It is preferred that 60% of the FSPs selected for the CFSP fulfill criterion (a), (b), (c), (a)+(b), (a)+(c), (b)+(c) or (a)+(b)+(c), more preferably at least 70% of the FSPs selected for the CFSP fulfill criterion (a), (b), (c), (a)+(b), (a)+(c), (b)+(c) or (a)+(b)+(c), more preferably at least 80% of the FSPs selected for the CFSP fulfill criterion (a), (b), (c), (a)+(b), (a)+(c), (b)+(c) or (a)+(b)+(c), more preferably at least 90% of the FSPs selected for the CFSP fulfill criterion (a), (b), (c), (a)+(b), (a)+(c), (b)+(c) or (a)+(b)+(c), more preferably at least 95% of the FSPs selected for the CFSP fulfill criterion (a), (b), (c), (a)+(b), (a)+(c), (b)+(c) or (a)+(b)+(c) and most preferably at least 100% of the FSPs selected for the CFSP fulfill criterion (a), (b), (c), (a)+(b), (a)+(c), (b)+(c) or (a)+(b)+(c).

[0112] Regarding criterion (a) it is preferred that the FSP is encoded by a FSM that is observed with a CF observed for a subset of CS of a specific type of cancer that are part of the collection of M different CSs that is at least 5% for at least one or all of the cancer types present in the CS, preferably at least 10%, preferably at least 15%, preferably at least 20%, preferably at least 25%, preferably at least 30%, more preferably at least 35%, more preferably at least 40% for at least one or all of the cancer types present in the CS.

[0113] Regarding criterion (b) it is preferred that the average mRNA expression level of the gene with the FSM encoding the FSP is in the top 75^{th} percentile, preferably top 70^{th} percentile, preferably top 65^{th} percentile, preferably top 60^{th} percentile, preferably top 55^{th} percentile, more preferably top 50^{th} percentile, more preferably top 40^{th} percentile, more preferably top 30^{th} percentile of the distribution describing the average mRNA expression values of each protein-encoding gene across the CS, preferably of a specific type of cancer. The higher the relative abundance of the FSP the more likely the induction of an immune response is effective in treatment or prophylaxis of MSI cancers. Just for clarity the phrase “top 80^{th} percentile” refers to all FSMs that have an expression level within including the highest expressed mRNA and only excludes the lowest expressed 19% of the mRNAs. Accordingly, the “top 30^{th} percentile” refers to all FSMs that have an expression level including the highest expressed mRNA and excludes the lowest expressed 69% of the mRNAs.

[0114] Preferred combinations of criterions (a) and (b) are CF of at least 5% and mRNA expression level of the gene with the FSM is in the top 75^{th} percentile, preferably top 70^{th} percentile, preferably top 65^{th} percentile, preferably top 60^{th} percentile, preferably top 55^{th} percentile, more preferably top 50^{th} percentile, more preferably top 40^{th} percentile, more preferably top 30^{th} percentile of the distribution describing the average mRNA expression values of each protein-encoding gene across the CS, preferably of a specific type of cancer. Other preferred combinations of criterions (a) and (b) are CF of at least 10% and mRNA expression level of the gene with the FSM is in the top 75^{th} percentile, preferably top 70^{th} percentile, preferably top 65^{th} percentile, preferably top 60^{th} percentile, preferably top 55^{th} percentile, more preferably top 50^{th} percentile, more preferably top 40^{th} percentile, more preferably top 30^{th} percentile of the distribution describing the average mRNA expression values of each protein-encoding gene across the CS, preferably of a specific type of cancer. Other preferred combinations of criterions (a) and (b) are CF of at least 15% and mRNA expression level of the gene with the FSM is in the top 75^{th} percentile, preferably top 70^{th} percentile, preferably top 65^{th} percentile, preferably top 60^{th} percentile, preferably top 55^{th} percentile, more preferably top 50^{th} percentile, more preferably top 40^{th} percentile, more preferably top 30^{th} percentile of the distribution describing the average mRNA expression values of each protein-encoding gene across the CS, preferably of a specific type of cancer. Other preferred combinations of criterions (a) and (b) are CF of at least 20% and mRNA expression level of the gene with the FSM is in the top 75^{th} percentile, preferably top 70^{th} percentile, preferably top 65^{th} percentile, preferably top 60^{th} percentile, preferably top 55^{th} percentile, more preferably top 50^{th} percentile, more preferably top 40^{th} percentile, more preferably top 30^{th} percentile of the distribution describing the average mRNA expression values of each protein-encoding gene across the CS, preferably of a specific type of cancer.

[0115] Regarding criterion (c) it is preferred the FSM generating the FSP is observed in less than 2% in normal tissues in a cohort of subjects without a cancer, more preferably in less than 1.9%, less than 1.8%, less than 1.7%, less than 1.6%, less than 1.5%, less than 1.4%, less than 1.3%, less than 1.2%, less than 1.1%, less than 1.0% or less.

[0116] In a preferred embodiment of the method of the first aspect of the invention:
[0117] (i) the CS are derived from patients having a MSI tumor, preferably colorectal cancer and/or gastric cancer and/or endometrial cancer, more preferably colorectal cancer, gastric cancer and endometrial cancer; and/or
[0118] (ii) M is at least 30, preferably at least 50, more preferably at least 100, more preferably at least 200, most preferably at least 300; and/or
[0119] (iii) X is at least 50, preferably at least 100, more preferably at least 200, and more preferably at least 300.

[0120] Preferably, M is at least 30 and X is at least 50, preferably at least 100, more preferably at least 200, and more preferably at least 300, preferably, M is at least 50 and X is at least 50, preferably at least 100, more preferably at least 200, and more preferably at least 300, M is at least 100 and X is at least 50, preferably at least 100, more preferably at least 200, and more preferably at least 300, M is at least 200 and X is at least 50, preferably at least 100, more preferably at least 200, and more preferably at least 300, even more preferably M is at least 300 and X is at least 50, preferably at least 100, more preferably at least 200, and more preferably at least 300.

[0121] The increase of the sample number M ascertains a broader, i.e. more universal, applicability of the CVP. However, due to the statistic distribution of FSMs, the completeness of the determination of all FSMs occurring in a particular MSI cancer type will asymptotically reach a maximum for a given number of samples. Thus, no significant improvement will be obtained, when more than 400 samples of a particular MSI cancer type are included. To improve the broad coverage of the FSMs present in MSI cancer type it is preferred to use CS of two or more MSI cancers. Preferred MSI cancers which are amenable to treatment and prophylaxis at the same time are colorectal cancer, and gastric cancer, colorectal cancer and endometrial cancer, gastric cancer and endometrial cancer, and colorectal cancer, gastric cancer and endometrial cancer.

[0122] In a second aspect, the present invention relates to a method of determining the amino acid sequences of peptides comprised in a CVP or of the nucleic acid sequences encoding the peptides comprised in the CVP, comprising the steps of:
[0123] (a) selecting at least Y FSPs or antigenic fragments thereof from the CFSP selected according to the first aspect of the invention;
[0124] (b) modifying the amino acid sequence of one or more or of all of those FSPs which fulfill the following criteria: (i) the FSP has a length of between 4 to 9 amino acids, and/or (ii) the FSP contains one or more identical contiguous stretches of 8 or more amino acids present in more than one FSP encoded by the same FSM and/or (iii) the FSP contains one or more contiguous stretches of 8 or more amino acids also present in wt human proteins, wherein the amino acid sequence of a FSP according to (i) is modified by adding to the N-terminus of the FSP between 1, 2, 3, or 4, preferably 4 amino acids of the wild type (wt) amino acid sequence present immediately upstream of the FSP and wherein the modified FSP (mFSP) has a length of at least 8 amino acids; the amino acid sequence of a FSP according to (ii) is modified by removing these contiguous stretches from all but the longest FSP with the proviso that FSPs with a length of less than 4 amino acids after removal of the contiguous stretch are excluded from the CVP; and/or the amino acid sequence of a FSP according to (iii) is modified by removing these stretches; modified FSPs with a length of less than 4 amino acids after removal of the contiguous stretch are excluded from the CVP, and
   wherein the amino acid sequences of the CVP comprises the amino acid sequences of the FSPs or antigenic fragments thereof selected in step a) and/or modified in step (b);
   and wherein Y is at least 20 more preferably at least 35.

[0125] In the context of the second aspect, it is noted that the term “determining” is used, as is immediately apparent from step (b), not in the sense of “identifying” the sequence of peptides (e.g. by sequencing), but in a the sense of “defining”, “fixing”, “codifying” or “modifying”.

[0126] In one embodiment, at least one of the FSPs modified in step (b) is, or is expected to be, i) immunogenic and ii) present in the patient tumor. Preferably, the immunogenicity of this FSP is not suppressed by another FSP selected or modified.

[0127] In a further embodiment, the FSPs modified in step (b) are candidate FSPs for producing a universal MSI CVP for prophylaxis or treatment of a patient with a cancer comprising hereditary and sporadic MSI cancer or being at risk of developing such a cancer.

[0128] The modification of FSPs according to step (b) serves the purpose to improve the antigenicity of the FSPs. It is preferred that at least 50% of the FSPs that fulfill criterions (i), (ii), (iii), (i)+(ii), (i)+(iii), (ii)+(iii), or (i)+(ii)+(iii) are modified, more preferably at least 60% of the FSPs that fulfill criterions (i), (ii), (iii), (i)+(ii), (i)+(iii), (ii)+(iii), or (i)+(ii)+(iii) are modified, at least 70% of the FSPs that fulfill criterions (i), (ii), (iii), (i)+(ii), (i)+(iii), (ii)+(iii), or (i)+(ii)+(iii) are modified, more preferably at least 80% of the FSPs that fulfill criterions (i), (ii), (iii), (i)+(ii), (i)+(iii), (ii)+(iii), or (i)+(ii)+(iii) are modified, more preferably at least 90% of the FSPs that fulfill criterions (i), (ii), (iii), (i)+(ii), (i)+(iii), (ii)+(iii), or (i)+(ii)+(iii) are modified, more preferably at least 95% of the FSPs that fulfill criterions (i), (ii), (iii), (i)+(ii), (i)+(iii), (ii)+(iii), or (i)+(ii)+(iii) are modified, and most preferably 100% of the FSPs that fulfill criterions (i), (ii), (iii), (i)+(ii), (i)+(iii), (ii)+(iii), or (i)+(ii)+(iii) are modified.

[0129] In a preferred embodiment of the second aspect of the present invention the selection of FSPs and mFSPs is carried out in step (a) in that the FSPs are successively selected from the CFSP and in each selection step a new FSP is selected from the CFSP that increases the cumulative amount of total FSP amino acid length (CAFSPL) to reach a threshold value in the maximal number of cancer samples which are below that threshold value and, optionally, if more than one FSP increases the CAFSPL for the maximal number of cancer samples for which the CAFSPL is still below the threshold value the FSP with the highest score is selected.

[0130] In a preferred embodiment of the second aspect of the present invention:
[0131] (i) the CAFSPL for each cancer sample is determined by summing up the amino acid length of the FSPs that are already part of the CVP and the new FSP from the CFSP for which the corresponding FSMs are present in the cancer sample; and/or
[0132] (ii) wherein the threshold value is defined separately for each subset of samples out of the CS that belong to a particular cancer type; and/or
[0133] (iii) wherein the score is defined as the product between the amino acid length of the FSP and the overall frequency with which the FSM generating the FSP is observed in the CS, optionally without counting the FSM in CS from a cancer type for which CF is below 5%, more preferably below 4%, more preferably below 3%, and/or
[0134] (iv) wherein the subset of cancer samples comprises all cancer samples from tumor types where the FSM is present with a CF greater than or equal to 5%, more preferably greater than or equal to 10% greater than or equal to 15%; and/or
[0135] (v) wherein FSPs generated by a FSM with an overall frequency lower than 5% more preferably below 4%, more preferably below 3% are excluded from the selection; and/or
[0136] (vi) wherein addition of new FSPs and/or modified FSPs proceeds until no further FSP is available whose inclusion in the CVP would increase the CAFSPL of any cancer sample whose CAFSPL is still below a threshold value (TV) or the cumulative length of all FSPs present in the CVP has reached a maximal value of V amino acids; and/or
[0137] (vii) wherein FSPs originating from the same FSM are treated as one FSP with a combined score calculated as the sum of the scores of the individual FSPs.

[0138] The criterions (i) to (vii) serve the purpose to improve the universality of the FSPs selected for the CVP by providing high immunogenic coverage to a cohort of patients with one or more types of MSI cancers. In addition criterion (vi) also allows to select a CVP that is practically feasible by limiting the total amount of antigens that can be encoded in the vaccine. The use of the scoring system ensures that FSPs with a higher observed frequency (therefore expected to be present in a large number of patients) and with a longer total amino acid length (i.e. FSPs with a higher overall immunogenic potential), are preferably included in the CVP.

[0139] In a preferred embodiment criterions (i)+(iii)+(vi) are fulfilled for at least 50%, more preferably at least 60%, at least 70%, at least 80%, at least 90%, at least 95% of the FSPs.

[0140] It is thus preferred that at least 50% FSPs are selected preferably based on criterions (i)+(iii)+(vi), more preferably based on criterions (i)+(ii)+(iii)+(vi), (i)+(iii)+(iv)+(vi), (i)+(iii)+(v)+(vi) or (i)+(iii)+(vi)+(vii), more preferably based on criterions (i)+(ii)+(iii)+(iv)+(vi), (i)+(ii)+(iii)+(v)+(vi), (i)+(ii)+(iii)+(vi)+(vii), (i)+(iii)+(iv)+(v)+(vi), (i)+(iii)+(iv)+(vi)+(vii) or (i)+(iii)+(v)+(vi)+(vii), more preferably based on criterions (i)+(ii)+(iii)+(iv)+(v)+(vi), (i)+(ii)+(iii)+(iv)+(vi)+(vii), (i)+(ii)+(iii)+(v)+(vi)+(vii) or (i)+(iii)+(iv)+(v)+(vi)+(vii), most preferably based on criterions (i)+(ii)+(iii)+(iv)+(v)+(vi)+(vii), more preferably at least 60% FSPs are selected preferably based on criterions (i)+(iii)+(vi), more preferably based on criterions (i)+(ii)+(iii)+(vi), (i)+(iii)+(iv)+(vi), (i)+(iii)+(v)+(vi) or (i)+(iii)+(vi)+(vii), more preferably based on criterions (i)+(ii)+(iii)+(iv)+(vi), (i)+(ii)+(iii)+(v)+(vi), (i)+(ii)+(iii)+(vi)+(vii), (i)+(iii)+(iv)+(v)+(vi), (i)+(iii)+(iv)+(vi)+(vii) or (i)+(iii)+(v)+(vi)+(vii), more preferably based on criterions (i)+(ii)+(iii)+(iv)+(v)+(vi), (i)+(ii)+(iii)+(iv)+(vi)+(vii), (i)+(ii)+(iii)+(v)+(vi)+(vii) or (i)+(iii)+(iv)+(v)+(vi)+(vii), most preferably based on criterions (i)+(ii)+(iii)+(iv)+(v)+(vi)+(vii), more preferably at least 70% FSPs are selected preferably based on criterions (i)+(iii)+(vi), more preferably based on criterions (i)+(ii)+(iii)+(vi), (i)+(iii)+(iv)+(vi), (i)+(iii)+(v)+(vi) or (i)+(iii)+(vi)+(vii), more preferably based on criterions (i)+(ii)+(iii)+(iv)+(vi), (i)+(ii)+(iii)+(v)+(vi), (i)+(ii)+(iii)+(vi)+(vii), (i)+(iii)+(iv)+(v)+(vi), (i)+(iii)+(iv)+(vi)+(vii) or (i)+(iii)+(v)+(vi)+(vii), more preferably based on criterions(i)+(ii)+(iii)+(iv)+(v)+(vi), (i)+(ii)+(iii)+(iv)+(vi)+(vii), (i)+(ii)+(iii)+(v)+(vi)+(vii) or (i)+(iii)+(iv)+(v)+(vi)+(vii), most preferably based on criterions(i)+(ii)+(iii)+(iv)+(v)+(vi)+(vii), more preferably at least 80% FSPs are selected preferably based on criterions (i)+(iii)+(vi), more preferably based on criterions (i)+(ii)+(iii)+(vi), (i)+(iii)+(iv)+(vi), (i)+(iii)+(v)+(vi) or (i)+(iii)+(vi)+(vii), more preferably based on criterions (i)+(ii)+(iii)+(iv)+(vi), (i)+(ii)+(iii)+(v)+(vi), (i)+(ii)+(iii)+(vi)+(vii), (i)+(iii)+(iv)+(v)+(vi), (i)+(iii)+(iv)+(vi)+(vii) or (i)+(iii)+(v)+(vi)+(vii), more preferably based on criterions (i)+(ii)+(iii)+(iv)+(v)+(vi), (i)+(ii)+(iii)+(iv)+(vi)+(vii), (i)+(ii)+(iii)+(v)+(vi)+(vii) or (i)+(iii)+(iv)+(v)+(vi)+(vii), most preferably based on criterions (i)+(ii)+(iii)+(iv)+(v)+(vi)+(vii), more preferably at least 90% FSPs are selected preferably based on criterions (i)+(iii)+(vi), more preferably based on criterions (i)+(ii)+(iii)+(vi), (i)+(iii)+(iv)+(vi), (i)+(iii)+(v)+(vi) or (i)+(iii)+(vi)+(vii), more preferably based on criterions (i)+(ii)+(iii)+(iv)+(vi), (i)+(ii)+(iii)+(v)+(vi), (i)+(ii)+(iii)+(vi)+(vii), (i)+(iii)+(iv)+(v)+(vi), (i)+(iii)+(iv)+(vi)+(vii) or (i)+(iii)+(v)+(vi)+(vii), more preferably based on criterions (i)+(ii)+(iii)+(iv)+(v)+(vi), (i)+(ii)+(iii)+(iv)+(vi)+(vii), (i)+(ii)+(iii)+(v)+(vi)+(vii) or (i)+(iii)+(iv)+(v)+(vi)+(vii), most preferably based on criterions (i)+(ii)+(iii)+(iv)+(v)+(vi)+(vii), and most preferably 100% FSPs are selected preferably based on criterions (i)+(iii)+(vi), more preferably based on criterions (i)+(ii)+(iii)+(vi), (i)+(iii)+(iv)+(vi), (i)+(iii)+(v)+(vi) or (i)+(iii)+(vi)+(vii), more preferably based on criterions (i)+(ii)+(iii)+(iv)+(vi), (i)+(ii)+(iii)+(v)+(vi), (i)+(ii)+(iii)+(vi)+(vii), (i)+(iii)+(iv)+(v)+(vi), (i)+(iii)+(iv)+(vi)+(vii) or (i)+(iii)+(v)+(vi)+(vii), more preferably based on criterions (i)+(ii)+(iii)+(iv)+(v)+(vi), (i)+(ii)+(iii)+(iv)+(vi)+(vii), (i)+(ii)+(iii)+(v)+(vi)+(vii) or (i)+(iii)+(iv)+(v)+(vi)+(vii), most preferably based on criterions (i)+(ii)+(iii)+(iv)+(v)+(vi)+(vii).

[0141] It is immediately apparent to the skilled person that the score can also be defined in alternative ways, for example based only on the overall frequency of the FSM generating the FSP, the length or the reciprocal length of the FSP or as the sum of cancer-specific scores, or after excluding one or more cancer types from the calculation of the score. An alternative score may further include or be exclusively based on the number of predicted MHC class I and/or class II epitopes within each FSP. It is also immediately apparent to the skilled person that criterion (vii) might be modified if the expression levels of the specific mRNA isoforms comprising the FSM are known. In that case, one or more of the FSPs generated by the same FSM could be excluded from the selection or the score of the FSPs arising from the individual mRNA isoforms comprising the FSM can be weighted according to the observed relative expression levels of the isoforms.

[0142] In a preferred embodiment of the second aspect of the present invention:
[0143] (i) addition of new FSPs proceeds until no further FSP is available whose inclusion in the CVP would increase the CAFSPL of any cancer sample whose CAFSPL is still below TV; and/or
[0144] (ii) FSPs originating from the same FSM are treated as one FSP with a combined score calculated as the sum of the scores of the individual FSPs.

[0145] In a preferred embodiment of the second aspect of the present invention
[0146] (a) the TV is at least 400 amino acids, preferably at least 600 amino acids, more preferably at least 800 amino acids; or
[0147] (b) the TV is:
   [0148] (i) at least 400 amino acids, preferably at least 600 amino acids, more preferably at least 800 amino acids for colorectal and gastric cancer; and
   [0149] (ii) at least 200 amino acids, preferably at least 300 amino acids, more preferably at least 400 amino acids for endometrial cancer.

[0150] It is immediately clear to the skilled person that the values of TV can be extended to any situation where the selection is performed on a CS that includes different types of cancers, e.g. combinations of samples from colorectal cancer, gastric cancer, endometrial cancer, small intestine cancer, hepatobiliary tract cancer, liver cancer, neuroendocrine cancers, cervical cancer, ovarian cancer, uterine sarcomas, brain cancer and/or skin cancer.

[0151] In a preferred embodiment of the second aspect of the present invention:
[0152] (i) the CVP comprises at least 4 amino acids of each FSP selected from the CFSP; and/or
[0153] (ii) Y is selected in such that the cumulative amino acid length V of all peptides that are part of the CVP is at least 280 amino acids, preferably at least 6000;
[0154] (iii) Y is at least 35, preferably at least 50, preferably at least 100, more preferably at least 200, and/or
[0155] (iv) the CVP comprises FSPs and/or mFSPs selected from the group of FSPs and/or mFSPs according to SEQ ID NO: 1 to 1087, preferably selected from the group of FSPs and/or mFSPs according to SEQ ID NO: 1 to 209.

[0156] In a third aspect, the present invention relates to a method of producing a CVP or a collection of nucleic acids encoding the CVP comprising the steps of
[0157] (i) obtaining the amino acid or nucleic acid sequence information determined in the method of the second aspect of the invention; and
[0158] (ii) synthesizing the amino acid sequence of the CVP in one or more polypeptides or a collection of nucleic acids with that sequence and optionally inserting the collection of nucleic acids into one or more expression cassettes and/or a collection of expression vectors.

[0159] The synthesizing of the FSPs and, if modified the mFSPs, or antigenic fragments thereof of the CVP may be carried out by recombinant expression of a collection of nucleic acids encoding the FSPs and, if modified the mFSPs or antigenic fragments thereof or by chemical synthesis. Similarly, the synthesis of the collection of nucleic acids encoding the peptides of the CVP can be carried out by known methods including chemical synthesis on a solid phase.

[0160] In a fourth aspect, the present invention relates to a CVP producible by the method of the second aspect of the invention or a collection of nucleic acids encoding the peptides of said CVP.

[0161] In a fifth aspect, the CVP comprises or consists of Y different FSPs and/or mFSPs or antigenic fragment of the FSP and/or mFSP with a length of at least 8 amino acids, wherein each FSP or the FSPs which are modified to mFSP is the complete translation product of the protein-encoding segment of a FSM containing nucleic acid starting from the codon encoding the first amino acid that is different relative to the translation of the corresponding wt nucleic acid without the FSM of in either case at least 4 amino acid length and wherein at least 50% of the FSPs or the FSPs which are modified to mFSPs fulfill one or more of the following criteria:
[0162] (a) the FSP is encoded by a FSM that is observed with a cancer type specific frequency (CF) observed for a subset of CS of a specific type of cancer that are part of a collection of M different CS s that is at least 5% for at least one of the cancer types present in the CS; and/or
[0163] (b) the average mRNA expression level of the gene with the FSM encoding the FSP is in the top 80^{th} percentile of the distribution describing the average mRNA expression values of each protein-encoding gene across the CS; and/or
[0164] (c) the FSM generating the FSP is observed in less than 2% in normal tissues in a cohort of subjects without a cancer
   wherein the amino acid sequence of one or more or all those FSPs which fulfill the following criteria: (i) the FSP encoded by a nucleic acid comprising a FSM starting from the amino acid encoded by the FC has a length between 4 to 9 amino acids, and/or (ii) the FSP contains one or more identical contiguous stretches of 8 or more amino acids present in more than one FSP encoded by the same FSM and/or (iii) the FSP contains one or more contiguous stretches of 8 or more amino acids also present in wt human proteins,
   are modified for a FSP according to (i) by adding to the N-terminus of the FSP between 1 to 4 amino acids of the wild type (wt) amino acid sequence present immediately upstream of the FSP and wherein the modified FSP (mFSP) has a length of at least 8 amino acids; for a FSP according to (ii) is modified by removing these contiguous stretches from all but the longest FSP with the proviso that FSPs with a length of less than 4 amino acids after removal of the contiguous stretch are excluded from the CVP; and/or for a FSP according to (iii) is modified by removing these stretches; modified FSPs with a length of less than 4 amino acids after removal of the contiguous stretch are excluded from the CVP;
   and wherein Y is at least 20 more preferably at least 35 and M is at least 5.

[0165] Preferably, at least 50% of the FSPs included in the CVP fulfill criterion (a), (b), (c), (a)+(b), (a)+(c), (b)+(c) or (a)+(b)+(c). It is preferred that 60% of the FSPs selected for the CFSP fulfill criterion (a), (b), (c), (a)+(b), (a)+(c), (b)+(c) or (a)+(b)+(c), more preferably at least 70% of the FSPs selected for the CFSP fulfill criterion (a), (b), (c), (a)+(b), (a)+(c), (b)+(c) or (a)+(b)+(c), more preferably at least 80% of the FSPs selected for the CFSP fulfill criterion (a), (b), (c), (a)+(b), (a)+(c), (b)+(c) or (a)+(b)+(c), more preferably at least 90% of the FSPs selected for the CFSP fulfill criterion (a), (b), (c), (a)+(b), (a)+(c), (b)+(c) or (a)+(b)+(c), more preferably at least 95% of the FSPs selected for the CFSP fulfill criterion (a), (b), (c), (a)+(b), (a)+(c), (b)+(c) or (a)+(b)+(c) and most preferably at least 100% of the FSPs selected for the CFSP fulfill criterion (a), (b), (c), (a)+(b), (a)+(c), (b)+(c) or (a)+(b)+(c).

[0166] Regarding criterion (a) it is preferred that the FSP is encoded by a FSM that is observed with a CF observed for a subset of CS of a specific type of cancer that are part of the collection of M different CSs that is at least 10% for at least one or all of the cancer types present in the CS, preferably at least 15%, preferably at least 20%, preferably at least 25%, preferably at least 30%, more preferably at least 35%, more preferably at least 40% for at least one or all of the cancer types present in the CS.

[0167] Regarding criterion (b) it is preferred that the average mRNA expression level of the gene with the FSM encoding the FSP is in the top 75^{th} percentile, preferably top 70^{th} percentile, preferably top 65^{th} percentile, preferably top 60^{th} percentile, preferably top 55^{th} percentile, more preferably top 50^{th} percentile, more preferably top 40^{th} percentile, more preferably top 30^{th} percentile of the distribution describing the average mRNA expression values of each protein-encoding gene across the CS. The higher the relative abundance of the FSP the more likely the induction of an immune response is effective in treatment or prophylaxis of MSI cancers. Just for clarity the phrase “top 80^{th} percentile” refers to all FSMs that have an expression level within including the highest expressed mRNA and only excludes the lowest expressed 19% of the mRNAs. Accordingly, the “top 30^{th} percentile” refers to all FSMs that have an expression level including the highest expressed mRNA and excludes the lowest expressed 69% of the mRNAs.

[0168] Preferred combinations of criterions (a) and (b) are CF of at least 5% and mRNA expression level of the gene with the FSM is in the top 75^{th} percentile, preferably top 70^{th} percentile, preferably top 65^{th} percentile, preferably top 60^{th} percentile, preferably top 55^{th} percentile, more preferably top 50^{th} percentile, more preferably top 40^{th} percentile, more preferably top 30^{th} percentile of the distribution describing the average mRNA expression values of each protein-encoding gene across the CS, preferably of a specific type of cancer. Other preferred combinations of criterions (a) and (b) are CF of at least 10% and mRNA expression level of the gene with the FSM is in the top 75^{th} percentile, preferably top 70^{th} percentile, preferably top 65^{th} percentile, preferably top 60^{th} percentile, preferably top 55^{th} percentile, more preferably top 50^{th} percentile, more preferably top 40^{th} percentile, more preferably top 30^{th} percentile of the distribution describing the average mRNA expression values of each protein-encoding gene across the CS, preferably of a specific type of cancer. Other preferred combinations of criterions (a) and (b) are CF of at least 15% and mRNA expression level of the gene with the FSM is in the top 75^{th} percentile, preferably top 70^{th} percentile, preferably top 65^{th} percentile, preferably top 60^{th} percentile, preferably top 55^{th} percentile, more preferably top 50^{th} percentile, more preferably top 40^{th} percentile, more preferably top 30^{th} percentile of the distribution describing the average mRNA expression values of each protein-encoding gene across the CS, preferably of a specific type of cancer. Other preferred combinations of criterions (a) and (b) are CF of at least 20% and mRNA expression level of the gene with the FSM is in the top 75^{th} percentile, preferably top 70^{th} percentile, preferably top 65^{th} percentile, preferably top 60^{th} percentile, preferably top 55^{th} percentile, more preferably top 50^{th} percentile, more preferably top 40^{th} percentile, more preferably top 30^{th} percentile of the distribution describing the average mRNA expression values of each protein-encoding gene across the CS, preferably of a specific type of cancer.

[0169] Regarding criterion (c) it is preferred the FSM generating the FSP is observed in less than 2% in normal tissues in a cohort of subjects without a cancer, more preferably in less than 1.9%, less than 1.8%, less than 1.7%, less than 1.6%, less than 1.5%, less than 1.4%, less than 1.3%, less than 1.2%, less than 1.1%, less than 1.0% or less.

[0170] In a preferred embodiment the CVP of the fifth aspect of the present invention:
[0171] (i) the CS are derived from patients having a MSI tumor, preferably colorectal cancer and/or gastric cancer and/or endometrial cancer, more preferably colorectal cancer, gastric cancer and endometrial cancer; and/or
[0172] (ii) M is at least 10, preferably at least 20, preferably at least 30, preferably at least 50, more preferably at least 100, more preferably at least 200, most preferably at least 300; and/or
[0173] (iii) Y is at least 35, preferably at least 50, preferably at least 100, more preferably at least 200; and/or
[0174] (iv) the CVP comprises at least 4 preferably at least 6, more preferably at least 8 amino acids of each FSP; and/or
[0175] (v) Y is selected in such that the cumulative amino acid length V of all FSPs and/or mFSPs or antigenic fragments thereof that are part of the CVP is at least 280 amino acids, preferably at least 500 amino acids, preferably at least 1.000 amino acids, preferably at least 1.500 amino acids, preferably at least 2.000 amino acids, preferably at least 2.500 amino acids, preferably at least 3.000 amino acids preferably at least 3.500 amino acids, preferably at least 4.000 amino acids, preferably at least 4.500 amino acids, preferably at least 5.000 amino acids, preferably at least 5.500 amino acids, more preferably at least 6000; and/or
[0176] (vi) the FSPs and/or mFSPs of the CVP are selected from the group of FSPs and/or mFSPs according to SEQ ID NO: 1 to 1087, preferably selected from the group of FSPs and/or mFSPs according to SEQ ID NO: 1 to 209.

[0177] Preferably, M is at least 30 and Y is at least 50, preferably at least 100, more preferably at least 200, and more preferably at least 300, preferably, M is at least 50 and Y is at least 50, preferably at least 100, more preferably at least 200, and more preferably at least 300, M is at least 100 and Y is at least 50, preferably at least 100, more preferably at least 200, and more preferably at least 300, M is at least 200 and Y is at least 50, preferably at least 100, more preferably at least 200, and more preferably at least 300, even more preferably M is at least 300 and Y is at least 50, preferably at least 100, more preferably at least 200, and more preferably at least 300.

[0178] In one embodiment of the present invention the CVP of the fifth aspect of the invention further comprises one or more non-MSI cancer specific antigens. Preferably, such antigens are specific also to one or more of the cancer types to be treated.

[0179] In a preferred embodiment at least 35, preferably at least 50, preferably at least 100, more preferably at least 200, more preferably at least 209 FSPs and/or mFSPs or antigenic fragments thereof of the CVP are selected from the group of FSPs and/or mFSPs according to SEQ ID NO: 1 to 1087, preferably selected from the group of FSPs and/or mFSPs according to SEQ ID NO: 1 to 209.

[0180] The FSPs and mFSPs according to SEQ ID NO: 1 to 1087 are ordered from 1 to 1087 in decreasing order of relevance for prophylaxis or treatment of MSI tumors, in particular of colorectal carcinoma, gastric cancer and endometrial cancer. Particular suitable subsets comprise or consist of FSPs and mFSPs with the amino acid sequences of SEQ ID NO: 1 to 50, 1 to 75, 1 to 100, 1 to 125, 1 to 150, 1 to 175, 1 to 200, particularly preferably of 1 to 209, 1 to 225, 1 to 250, 1 to 275, 1 to 300, 1 to 325, 1 to 350 1 to 375, 1 to 400, 1 to 450, 1 to 500, 1 to 550, 1 to 600, 1, to 650, 1 to 700, 1 to 750, 1 to 800, 1 to 850, 1 to 900, 1 to 950, 1 to 1000, 1 to 1050 or 1 to 1087. While it is preferred that the subset comprise or consists of exactly the respectively indicated FSPs and/or mFSPs, it is understood by the skilled person that between 1 to 10% of these FSPs and/or mFSPs may be omitted from the set without any substantial loss in its activity. Similarly, and as implied by the “comprising” language a subset that comprises, e.g. the amino acid sequences of SEQ ID NO: 1 to 200 may additionally comprise 1 to 100 or more FSPs or mFSP of SEQ ID NO: 201 to 1087 and/or one or more other FSP or mFSP or a non-MSI cancer specific antigen.

[0181] In a preferred embodiment the CVP of the fifth aspect of the present invention the FSPs of the CVP have been successively selected from a CFSP and wherein in each selection step a new FSP or antigenic fragment thereof is selected from the CFSP to increase the CAFSPL to reach a threshold value in the maximal number of cancer samples which are below that threshold value and optionally, if more than one FSP increases the CAFSPL for the maximal number of cancer samples for which the CAFSPL is still below the threshold value, the FSP with the highest score is selected.

[0182] In a preferred embodiment the CVP of the fifth aspect of the present invention:

[0183] (i) the CAFSPL for each cancer sample is determined by summing up the amino acid length of the FSPs that are already part of the CVP and the new FSP from the CFSPP for which the corresponding FSMs are present in the cancer sample; and/or

[0184] (ii) the threshold value is defined separately for each subset of samples out of the CS that belong to a particular cancer type; and/or

[0185] (iii) the score is defined as the product between the amino acid length of the FSP and the overall frequency with which the FSM generating the FSP is observed in the CS; and/or

[0186] (iv) addition of new FSPs proceeds until no further FSP is available whose inclusion in the CVP would increase the CAFSPL of any cancer sample whose CAFSPL is still below a threshold value (TV); and/or

[0187] (v) wherein FSPs originating from the same FSM are treated as one FSP with a combined score calculated as the sum of the scores of the individual FSPs.

[0188] In a preferred embodiment the CVP of the fifth aspect of the present invention,

[0189] (i) wherein the CAFSPL for each cancer sample is determined by summing up the amino acid length of the FSPs that are already part of the CVP and the new FSP from the CFSP for the corresponding FSM are present in the cancer sample; and/or

[0190] (ii) wherein the threshold value is defined separately for each subset of samples out of the CS that belong to a particular cancer type; and/or

[0191] (iii) wherein the score is defined as the product between the amino acid length of the FSP and the overall frequency of the FSM generating the FSP without counting the FSM in cancer samples from a cancer type for which CF is below 5%, more preferably below 4% and more preferably below 3%; and/or

[0192] (iv) wherein the subset of cancer samples comprises all cancer samples from tumor types where the FSM is present with a CF greater than or equal to 5%, more preferably greater than or equal to 10% greater than or equal to 15%; and/or

[0193] (v) wherein FSPs generated by a FSM with an overall frequency lower than 5% more preferably below 4% and more preferably below 3% are excluded from the selection; and/or

[0194] (vi) wherein addition of new FSPs proceeds until no further FSP is available whose inclusion in the CVP would increase the CAFSPL of any cancer sample whose CAFSPL is still below a TV or the cumulative length of all FSPs present in the CVP has reached a maximal value of V amino acids; and/or

[0195] (vii) and wherein FSPs originating from the same FSM are treated as one FSP with a combined score calculated as the sum of the scores of the individual FSPs.

[0196] It is understood by the skilled person that the CVP according to the fifth aspect may be designed by the method of the first and second aspect and accordingly the selection steps and criteria outlined regarding the first and second aspect may equally be used to characterize the CVP of the firth aspect. Accordingly, in a preferred embodiment criterions (i)+(iii)+(vi) are fulfilled for at least 50%, more preferably at least 60%, at least 70%, at least 80%, at least 90%, at least 95% of the FSPs.

[0197] It is thus preferred that at least 50% FSPs are selected preferably based on criterions (i)+(iii)+(vi), more preferably based on criterions (i)+(ii)+(iii)+(vi), (i)+(iii)+(iv)+(vi), (i)+(iii)+(v)+(vi) or (i)+(iii)+(vi)+(vii), more preferably based on criterions (i)+(ii)+(iii)+(iv)+(vi), (i)+(ii)+(iii)+(v)+(vi), (i)+(ii)+(iii)+(vi)+(vii), (i)+(iii)+(iv)+(v)+(vi), (i)+(iii)+(iv)+(vi)+(vii) or (i)+(iii)+(v)+(vi)+(vii), more preferably based on criterions (i)+(ii)+(iii)+(iv)+(v)+(vi), (i)+(ii)+(iii)+(iv)+(vi)+(vii), (i)+(ii)+(iii)+(v)+(vi)+(vii) or (i)+(iii)+(iv)+(v)+(vi)+(vii), most preferably based on criterions (i)+(ii)+(iii)+(iv)+(v)+(vi)+(vii), more preferably at least 60% FSPs are selected preferably based on criterions (i)+(iii)+(vi), more preferably based on criterions (i)+(ii)+(iii)+(vi), (i)+(iii)+(iv)+(vi), (i)+(iii)+(v)+(vi) or (i)+(iii)+(vi)+(vii), more preferably based on criterions (i)+(ii)+(iii)+(iv)+(vi), (i)+(ii)+(iii)+(v)+(vi), (i)+(ii)+(iii)+(vi)+(vii), (i)+(iii)+(iv)+(v)+(vi), (i)+(iii)+(iv)+(vi)+(vii) or (i)+(iii)+(v)+(vi)+(vii), more preferably based on criterions (i)+(ii)+(iii)+(iv)+(v)+(vi), (i)+(ii)+(iii)+(iv)+(vi)+(vii), (i)+(ii)+(iii)+(v)+(vi)+(vii) or (i)+(iii)+(iv)+(v)+(vi)+(vii), most preferably based on criterions (i)+(ii)+(iii)+(iv)+(v)+(vi)+(vii), more preferably at least 70% FSPs are selected preferably based on criterions (i)+(iii)+(vi), more preferably based on criterions (i)+(ii)+(iii)+(vi), (i)+(iii)+(iv)+(vi), (i)+(iii)+(v)+(vi) or (i)+(iii)+(vi)+(vii), more preferably based on criterions (i)+(ii)+(iii)+(iv)+(vi), (i)+(ii)+(iii)+(v)+(vi), (i)+(ii)+(iii)+(vi)+(vii), (i)+(iii)+(iv)+(v)+(vi), (i)+(iii)+(iv)+(vi)+(vii) or (i)+(iii)+(v)+(vi)+(vii), more preferably based on criterions (i)+(ii)+(iii)+(iv)+(v)+(vi), (i)+(ii)+(iii)+(iv)+(vi)+(vii), (i)+(ii)+(iii)+(v)+(vi)+(vii) or (i)+(iii)+(iv)+(v)+(vi)+(vii), most preferably based on criterions (i)+(ii)+(iii)+(iv)+(v)+(vi)+(vii), more preferably at least 80% FSPs are selected preferably based on criterions (i)+(iii)+(vi), more preferably based on criterions (i)+(ii)+(iii)+(vi), (i)+(iii)+(iv)+(vi), (i)+(iii)+(v)+(vi) or (i)+(iii)+(vi)+(vii), more preferably based on criterions (i)+(ii)+(iii)+(iv)+(vi), (i)+(ii)+(iii)+(v)+(vi), (i)+(ii)+(iii)+(vi)+(vii), (i)+(iii)+(iv)+(v)+(vi), (i)+(iii)+(iv)+(vi)+(vii) or (i)+(iii)+(v)+(vi)+(vii), more preferably based on criterions (i)+(ii)+(iii)+(iv)+(v)+(vi), (i)+(ii)+(iii)+(iv)+(vi)+(vii), (i)+(ii)+(iii)+(v)+(vi)+(vii) or (i)+(iii)+(iv)+(v)+(vi)+(vii), most preferably based on criterions (i)+(ii)+(iii)+(iv)+(v)+(vi)+(vii), more preferably at least 90% FSPs are selected preferably based on criterions (i)+(iii)+(vi), more preferably based on criterions (i)+(ii)+(iii)+(vi), (i)+(iii)+(iv)+(vi), (i)+(iii)+(v)+(vi) or (i)+(iii)+(vi)+(vii), more preferably based on criterions (i)+(ii)+(iii)+(iv)+(vi), (i)+(ii)+(iii)+(v)+(vi), (i)+(ii)+(iii)+(vi)+(vii), (i)+(iii)+(iv)+(v)+(vi), (i)+(iii)+(iv)+(vi)+(vii) or (i)+(iii)+(v)+(vi)+(vii), more preferably based on criterions (i)+(ii)+(iii)+(iv)+(v)+(vi), (i)+(ii)+(iii)+(iv)+(vi)+(vii), (i)+(ii)+(iii)+(v)+(vi)+(vii) or (i)+(iii)+(iv)+(v)+(vi)+(vii), most preferably based on criterions (i)+(ii)+(iii)+(iv)+(v)+(vi)+(vii), and most preferably 100% FSPs are selected preferably based on criterions (i)+(iii)+(vi), more preferably based on criterions (i)+(ii)+(iii)+(vi), (i)+(iii)+(iv)+(vi), (i)+(iii)+(v)+(vi) or (i)+(iii)+(vi)+(vii), more preferably based on criterions (i)+(ii)+(iii)+(iv)+(vi), (i)+(ii)+(iii)+(v)+(vi), (i)+(ii)+(iii)+(vi)+(vii), (i)+(iii)+(iv)+(v)+(vi), (i)+(iii)+(iv)+(vi)+(vii) or (i)+(iii)+(v)+(vi)+(vii), more preferably based on criterions (i)+(ii)+(iii)+(iv)+(v)+(vi), (i)+(ii)+(iii)+(iv)+(vi)+(vii), (i)+(ii)+(iii)+(v)+(vi)+(vii) or (i)+(iii)+(iv)+(v)+(vi)+(vii), most preferably based on criterions (i)+(ii)+(iii)+(iv)+(v)+(vi)+(vii).

[0198] In a preferred embodiment the CVP of the fifth aspect of the present invention the TV is:

[0199] (a) the TV is at least 400 amino acids, preferably at least 600 amino acids, more preferably at least 800 amino acids; or

[0200] (b) the TV is:

[0201] (i) at least 400 amino acids, preferably at least 600 amino acids, more preferably at least 800 amino acids for colorectal and gastric cancer; and

[0202] (ii) at least 200 amino acids, preferably at least 300 amino acids, more preferably at least 400 amino acids for endometrial cancer.

[0203] In a preferred embodiment the CVP of the fifth aspect of the present invention the peptides of the CVP are separate or at least two FSPs and/or mFSPs are comprised in one or more polypeptides. When linking two or more FSPs and/or mFSPs to a polypeptide it is preferred that the linkage is direct with a peptide bond, i.e. without an amino acid linker.

[0204] It is also preferred that it is assessed before linking two FSPs and/or mFSPs within a polypeptide whether the resulting junction sequence contains one or more contiguous stretches of 8 or more amino acids also present in wt human proteins. If that is the case those two peptides are not linked in this way. Accordingly, the resulting polypeptide of linked FSPs and/or mFSPs will not contain one or more contiguous stretches of 8 or more amino acids also present in wt human proteins. Depending on the total length of the FSPs and/or mFSPs comprised in the CVP the FSPs and/or mFSPs may be comprised in two, three, four, five, six or more polypeptides.

[0205] The present inventors have assembled the 209 FSPs and mFSPs of SEQ ID NO: 1 to 209 or antigenic fragments thereof in four polypeptides and have found that this a particularly suitable way of providing these antigens. Preferred arrangements of the FSPs and mFSPs of SEQ ID NO: 1 to 209 in four polypeptides consists of or comprises the following four polypeptides with amino acid sequences according to SEQ ID NO: 1088 to 1091 (layout A), SEQ ID NO: 1092 to 1095 (layout B), SEQ ID NO: 1155 to 1158 (layout C) or SEQ ID NO: 1159 to 1162 (layout D).

[0206] It is preferred that in subsequent rounds of administration of the same CVP, i.e. comprising the same FSPs and mFSPs, the polypeptides comprising the FSPs and mFSPs, e.g. according to SEQ ID NO: 1 to 209, are arranged in different order. This minimizes unwanted immune reactions again junctional epitopes. For example, it is preferred to combine administration of the CVP in polypeptide layout A with polypeptide layout B, layout A with layout C, layout A with layout D, layout B with layout C, layout B with layout D, layout C with layout D, layout A with layout B and layout C, layout A with layout B and layout D, layout B with layout C and layout D, layout A with layout B, layout C and layout D.

[0207] Accordingly, the present invention also comprises 2, 3, 4, 5, 6, or more different layouts of polypeptides, wherein each set comprises one or more, preferably 2, 3, 4, 5, 6, 7, 8, 9, or 10 or more polypeptides comprising or consisting of the same FSPs and mFSPs or antigenic fragments thereof, i.e. are the same CVP. The difference between each set is thus not the amino acid sequence of the FSPs, mFSPs or antigenic fragments thereof, but the arrangement of the FSPs, mFSPs or antigenic fragments thereof in the respective number of polypeptides. It is particularly, preferred that a given CVP is provided in two different layouts and comprises one or more, preferably 2, 3, 4, 5, 6, 7, 8, 9, or 10 or more polypeptides, most preferably 4 polypeptides comprising or consisting of the same FSPs and mFSPs or antigenic fragments thereof, three different layouts and comprises one or more, preferably 2, 3, 4, 5, 6, 7, 8, 9, or 10 or more polypeptides, most preferably 4 polypeptides comprising or consisting of the same FSPs and mFSPs or antigenic fragments thereof, four different layouts and comprises one or more, preferably 2, 3, 4, 5, 6, 7, 8, 9, or 10 or more polypeptides, most preferably 4 polypeptides comprising or consisting of the same FSPs and mFSPs or antigenic fragments thereof, five different layouts and comprises one or more, preferably 2, 3, 4, 5, 6, 7, 8, 9, or 10 or more polypeptides, most preferably 4 polypeptides comprising or consisting of the same FSPs and mFSPs or antigenic fragments thereof. Preferably, each different layout is distinguished from the other layouts by different junction sequences, i.e. two layouts do not comprise a link between the same N- to C-terminal link of one FSP or mFSP to the next FSP or mFSP.

[0208] Each layout will typically be administered separately to a patient and, thus, the different layouts can also be viewed as separate compositions of the same CVP.

[0209] In a preferred embodiment the CVP of the fifth aspect of the present invention one or more FSPs and/or mFSPs or polypeptides comprising two or more FSPs and/or mFSPs of the CVP are linked, preferably by peptide bonds, to one or more of the following elements that enhance immunogenicity of the CVP: an invariant chain sequence or fragment thereof; a tissue-type plasminogen activator; a PEST sequence; a cyclin destruction box; an ubiquitination signal; a SUMOylation signal; an Interleukin, preferably an Interleukin 2, Interleukin 12, or Interleukin 15; a checkpoint protein specific ligand, preferably an anti-PD1 antibody or PD1-binding fragment thereof, an anti-CTLA4 antibody or an anti-CTLA4-binding fragment thereof, an anti-LAGS antibody or an anti-LAGS-binding fragment, an anti-TIM3 antibody or an anti-TIM3-binding fragment thereof.

[0210] In a preferred embodiment a sorting signal (either the human tissue plasminogen activator signal peptide (hTPA; SEQ ID NO: 1104 or a functional fragment thereof that is sorted as the hTPA) or the human invariant chain (hINV; SEQ ID NO: 1105 or a functional fragment thereof that is sorted as the hINV) is added at the N-terminus and, optionally an influenza HA-tag sequence (SEQ ID NO: 1106) at the C-terminus of the polypeptides of SEQ ID NO: 1088 to 1091 (layout A), SEQ ID NO: 1092 to 1095 (layout B), SEQ ID NO: 1155 to 1158 (layout C) or SEQ ID NO: 1159 to 1162 (layout D).

[0211] Preferred amino acid sequence of so constructed polypeptides are provided as SEQ ID NO: 1107 to 1110 (layout A), SEQ ID NO: 1111 to 1114 (layout B), SEQ ID NO: 1171 to 1174 (layout C) and SEQ ID NO: 1179 to 1182 (layout D) for hTPA and by SEQ ID NO: 1115 to 1118 (layout A), SEQ ID NO: 1119 to 1122 (layout B), SEQ ID NO: 1175 to 1178 (layout C) and SEQ ID NO: 1183 to 1186 (layout D) for hINV.

[0212] In a sixth aspect, the present invention relates to a collection of nucleic acids encoding the CVP of the fifth aspect of the present invention. The nucleic acid may preferably be DNA, RNA or RNA modified to increase its serum half-life.

[0213] For the reasons set out above regarding the CVP it is preferred to use 2, 3, 4, 5, 6, 7, 8, 9, 10 or more, preferably 4 different layouts of the 1, 2, 3, 4, 5, 6, 7, 8, 9, or 10 or more polypeptides comprising the FSPs, mFPS or antigenic fragments thereof. Consistently, the collection of nucleic acids encoding the respective number of polypeptides have different layouts. In a preferred embodiment the collection of nucleic acids encoding the FSB and/or mFSB encode the four polypeptides according to SEQ ID NO: 1088 to 1091 (layout A), SEQ ID NO: 1092 to 1095 (layout B), SEQ ID NO: 1155 to 1158 (layout C) or SEQ ID NO: 1159 to 1162 (layout D) and are codon-optimized based on human codon usage.

[0214] When a CVP is administered in the form of a collection of nucleic acids encoding the given CVP it is preferred to use 2, 3, 4, 5, 6, or more different layouts of the nucleic acids, wherein each layout comprises one or more, preferably 2, 3, 4, 5, 6, 7, 8, 9, or 10 or more nucleic acids encoding polypeptides comprising or consisting of the same FSPs and mFSPs or antigenic fragments thereof, i.e. encode the same CVP. It is particularly, preferred that a given collection of nucleic acids encoding the CVP of the fourth or fifth aspect of the invention is provided in two different layouts and comprises one or more, preferably 2, 3, 4, 5, 6, 7, 8, 9, or 10 or more nucleic acids encoding polypeptides, most preferably 4 nucleic acids encoding polypeptides comprising or consisting of the same FSPs and mFSPs or antigenic fragments thereof, three different layouts and comprises one or more, preferably 2, 3, 4, 5, 6, 7, 8, 9, or 10 or more nucleic acids encoding polypeptides, most preferably 4 nucleic acids encoding polypeptides comprising or consisting of the same FSPs and mFSPs or antigenic fragments thereof, four different layouts and comprises one or more, preferably 2, 3, 4, 5, 6, 7, 8, 9, or 10 or more nucleic acids encoding polypeptides, most preferably 4 nucleic acids encoding polypeptides comprising or consisting of the same FSPs and mFSPs or antigenic fragments thereof, five different layouts and comprises one or more, preferably 2, 3, 4, 5, 6, 7, 8, 9, or 10 or more nucleic acids encoding polypeptides, most preferably 4 nucleic acids encoding polypeptides comprising or consisting of the same FSPs and mFSPs or antigenic fragments thereof, or six different layouts and comprises one or more, preferably 2, 3, 4, 5, 6, 7, 8, 9, or 10 or more nucleic acids encoding polypeptides, most preferably 4 nucleic acids encoding polypeptides comprising or consisting of the same FSPs and mFSPs or antigenic fragments thereof.

[0215] Further examples of such nucleic acid collections encoding FSPs and mFSPs of SEQ ID NO: 1 to 209, encoding the same CVP, but with different layout are provided in SEQ ID NO: 1123 to 1126 for layout A and SEQ ID NO: 1187 to 1190 for layout C with hTPA; SEQ ID NO: 1127 to 1130 for layout B and SEQ ID NO: 1191 to 1194 for layout D with hTPA; SEQ ID NO: 1131 to 1134 for layout A and SEQ ID NO: 1195 to 1198 for layout C with hINV and SEQ ID NO: 1135 to 1138 for layout B and SEQ ID NO: 1199 to 1202 for layout D with hINV.

[0216] In a preferred embodiment, a Kozak sequence (CGCGACTTCGCCGCC) may be placed immediately upstream of the start codon of the collection nucleic acid according to the fourth or sixth aspect of the invention to allow for efficient initiation of translation and a TAA stop codon was placed downstream of the HA tag. Finally, it is preferred that the collection of nucleic acid comprises two flanking segments comprising unique restriction sites to facilitate the sub-cloning of the cassettes were added at the 5′- and 3′-end of the nucleotide sequence, respectively (FIG. 7).

[0217] The collection of nucleic acids of the fourth and sixth aspect of the present invention may also be comprised in an expression cassette.

[0218] In a seventh aspect the invention relates to a collection of one or more expression vectors each comprising all or part of the collection of nucleic acids of the fourth or sixth aspect of the invention, wherein the entirety of the collection of expression vectors comprise all of the collection of nucleic acids of the fourth or sixth aspect of the invention, i.e. wherein the collection of expression comprises nucleic acids encoding all FSPs, mFSP or antigenic fragments thereof of a given CVP.

[0219] It is preferred that the collection of expression vectors of comprise one or more elements that enhance immunogenicity of the expression vector. Preferably such elements are expressed as a fusion to the FSPs, mFSPs or antigenic fragments thereof or are encoded by another nucleic acid comprised in the vector, preferably in an expression cassette.

[0220] In a preferred embodiment the element that enhances immunogenicity of the CVP are selected from the group consisting of an invariant chain sequence or immune stimulatory fragment thereof; a tissue-type plasminogen activator; a PEST sequence; a cyclin destruction box; an ubiquitination signal; a SUMOylation signal; an Interleukin, preferably an Interleukin 2, Interleukin 12, or Interleukin 15; a checkpoint protein specific ligand, preferably an anti-PD1 antibody or PD1-binding fragment thereof, an anti-CTLA4 antibody or an anti-CTLA4-binding fragment thereof, an anti-LAGS antibody or an anti-LAGS-binding fragment, an anti-TIM3 antibody or an anti-TIM3-binding fragment thereof.

[0221] In a preferred embodiment of the collection of expression vectors of the seventh aspect each expression vector of the collection is independently selected from the group consisting of a plasmid; a cosmid; an RNA; an RNA-formulated with an adjuvant; an RNA formulated in liposomal particles; a self-amplifying RNA (SAM); a SAM formulated with an adjuvant; a SAM formulated in liposomal particles; a viral vector; preferably an alphavirus vector, a venezuelan equine encephalitis (VEE) virus vector, a sindbis (SIN) virus vector, a semliki forest virus (SFV) virus vector, also preferably a replication competent or incompetent adenoviral vector preferably derived from chimpanzee or bonobo or gorilla, a poxvirus vector, a vaccinia virus vector or a modified vaccinia ankara (MVA) vector, a simian or human cytomegalovirus (CMV) vector, a Lymphocyte choriomeningitis virus (LCMV) vector, a retroviral or lentiviral vector. It is preferred that all expression vectors used in one collection are of the same type, e.g. replication incompetent adenoviral vectors.

[0222] The most preferred expression vectors are adenoviral vectors, in particular adenoviral vectors derived from human or non-human great apes. Preferred great apes from which the adenoviruses are derived are Chimpanzee (Pan), Gorilla (Gorilla) and orangutans (Pongo), preferably Bonobo (Pan paniscus) and common Chimpanzee (Pan troglodytes). Typically, naturally occurring non-human great ape adenoviruses are isolated from stool samples of the respective great ape. The most preferred vectors are non-replicating adenoviral vectors based on hAd5, hAd11, hAd26, hAd35, hAd49, ChAd3, ChAd4, ChAd5, ChAd6, ChAd7, ChAd8, ChAd9, ChAd10, ChAd11, ChAd16, ChAd17, ChAd19, ChAd20, ChAd22, ChAd24, ChAd26, ChAd30, ChAd31, ChAd37, ChAd38, ChAd44, ChAd55, ChAd63, ChAd73, ChAd82, ChAd83, ChAd146, ChAd147, PanAd1, PanAd2, and PanAd3 vectors or replication-competent Ad4 and Ad7 vectors. The human adenoviruses hAd4, hAd5, hAd7, hAd11, hAd26, hAd35 and hAd49 are well known in the art. Vectors based on naturally occurring ChAd3, ChAd4, ChAd5, ChAd6, ChAd7, ChAd8, ChAd9, ChAd10, ChAd11, ChAd16, ChAd17, ChAd19, ChAd20, ChAd22, ChAd24, ChAd26, ChAd30, ChAd31, ChAd37, ChAd38, ChAd44, ChAd63 and ChAd82 are described in detail in WO 2005/071093. Vectors based on naturally occurring PanAd1, PanAd2, PanAd3, ChAd55, ChAd73, ChAd83, ChAd146, and ChAd147 are described in detail in WO 2010/086189.

[0223] In a particular embodiment, the adenovector is Gad20 (also termed GADNOU20, SEQ ID NO: 1219) or is derived therefrom. In one embodiment, derived therefrom means that the adenovector has at least 85%, and preferably at least 90%, 95%, 96%, 97%, 98% or 99% sequence identity to SEQ ID NO: 1219. In a preferred embodiment, however, it means the following:

[0224] The adenovector encodes an adenovirus hexon protein comprising:
[0225] (i) a first hypervariable region HVR1 comprising an amino acid (aa) sequence encoded by nucleotides 19386-19472 of SEQ ID NO: 1219, or a variant thereof having at least 85% aa sequence identity and with no A and preferably with a V at aa position 27,
[0226] (ii) a second hypervariable region HVR2 comprising an aa sequence encoded by nucleotides 19527-19571 of SEQ ID NO: 1219, or a variant thereof having at least 85% aa sequence identity and with no L and preferably with an I at aa position 1,
[0227] (iii) a third hypervariable region HVR3 comprising an aa sequence encoded by nucleotides 19623-19643 of SEQ ID NO: 1219, or a variant thereof having at least 85% aa sequence identity and with no V and preferably with an A at aa position 7,
[0228] (iv) a fourth hypervariable region HVR4 comprising an aa sequence encoded by nucleotides 19737-19772 of SEQ ID NO: 1219, or a variant thereof having at least 85% aa sequence identity,
[0229] (v) a fifth hypervariable region HVR5 comprising an aa sequence encoded by nucleotides 19794-19838 of SEQ ID NO: 1219, or a variant thereof having at least 85% aa sequence identity,
[0230] (vi) a sixth hypervariable region HVR6 comprising an aa sequence encoded by nucleotides 19908-19934 of SEQ ID NO: 1219, or a variant thereof having at least 85% aa sequence identity, and
[0231] (vii) a seventh hypervariable region HVR7 comprising an aa sequence encoded by nucleotides 20259-20336 of SEQ ID NO: 1219, or a variant thereof having at least 85% aa sequence identity with no I and preferably with a V at aa position 1.

[0232] In a preferred embodiment, the HVR variants have at least 90%, and more preferably at least 95% sequence identity. Alternative to the definition by a percentage level of sequence identity, the HVR variants can be defined to have a certain number of amino acid mutations compared to the encoded sequence. The number of mutations is then as follows: instead of at least 85% sequence identity, up to 4 mutations in HVR1, up to 2 mutations in HVR2, up to 1 mutation in HVR3, up to 1 mutation in HVR4, up to 2 mutations in HVR5, up to 1 mutations in HVR6, and up to 3 mutations in HVR7; instead of at least 90% sequence identity, up to 2 mutations in HVR1, up to 1 mutation in HVR2, up to 1 mutation and preferably no mutation in HVR3, up to 1 mutation in HVR4, up to 1 mutation in HVR5, up to 1 mutation and preferably no mutation in HVR6, and up to 2 mutations in HVR7; instead of at least 95% sequence identity, up to 1 mutation in HVR1, up to 1 mutation and preferably no mutation in HVR2, up to 1 mutation and preferably no mutation in HVR3, up to 1 mutation and preferably no mutation in HVR4, up to 1 mutation and preferably no mutation in HVR5, up to 1 mutation and preferably no mutation in HVR6, and up to 1 mutation in HVR7.

[0233] As known in the art, e.g. from Bradley et al. (J Virol., 2012 January; 86(2):1267-72), adenovirus neutralizing antibodies target the hexon hypervariable regions, and by replacing the HVR regions of an adenovirus with serumprevalence, that adenovirus can evade the immune system in the immune host. Thus, while the above HVRs can be used with the respective hexon proteins defined below, they have utility independent from those hexon proteins and also from the below penton and fiber proteins, namely by replacing the hexon HVRs in a different adenovirus having other hexon, penton and/or fiber proteins.

[0234] In a preferred embodiment, the hexon protein comprises an amino acid sequence encoded by nucleotides 18981-21845 of SEQ ID NO: 1219, or a variant thereof having at least 85% sequence identity,

[0235] In a preferred embodiment, the hexon variants have at least 90%, and preferably at least 95%, 96%, 97%, 98% or 99% sequence identity. Alternative to the definition by a percentage level of sequence identity, the hexon variants can be defined to have a certain number of amino acid mutations compared to the encoded sequence. The number of mutations is then as follows: instead of at least 85% sequence identity, up to 143 mutations; instead of at least 90% sequence identity, up to 95 mutations; instead of at least 95% sequence identity, up to 47 mutations; instead of at least 96% sequence identity, up to 38 mutations; instead of at least 97% sequence identity, up to 28 mutations; instead of at least 98% sequence identity, up to 19 mutations; instead of at least 99% sequence identity, up to 9 mutations. It is to be understood that the hexon variants do not have less sequence identity to or more mutations in their HVRs than defined for the respective HVRs above.

[0236] In one embodiment, the adenovector further encodes an adenoviral penton protein comprising an amino acid sequence encoded by nucleotides 14021-15973 of SEQ ID NO: 1219, or a variant thereof having at least 85% sequence identity. In a preferred embodiment, the penton variants have at least 90%, and preferably at least 95%, 96%, 97%, 98% or 99% sequence identity compared to the encoded sequence. Alternative to the definition by a percentage level of sequence identity, the penton variants can be defined to have a certain number of amino acid mutations. The number of mutations is then as follows: instead of at least 85% sequence identity, up to 97 mutations; instead of at least 90% sequence identity, up to 65 mutations; instead of at least 95% sequence identity, up to 32 mutations; instead of at least 96% sequence identity, up to 26 mutations; instead of at least 97% sequence identity, up to 19 mutations; instead of at least 98% sequence identity, up to 13 mutations; instead of at least 99% sequence identity, up to 6 mutations.

[0237] Preferably, the penton variants have no D and preferably a G at amino acid position 289 and no D and preferably an N at amino acid position 341.

[0238] In another embodiment, the adenovector further (i.e. next to the hexon and possibly the penton protein) encodes an adenoviral fiber protein comprising an amino acid sequence encoded by nucleotides 32163-33956 of SEQ ID NO: 1219, or a variant thereof having at least 85% sequence identity. In a preferred embodiment, the fiber variants have at least 90%, and preferably at least 95%, 96%, 97%, 98% or 99% sequence identity. Alternative to the definition by a percentage level of sequence identity, the fiber variants can be defined to have a certain number of amino acid mutations compared to the encoded sequence. The number of mutations is then as follows: instead of at least 85% sequence identity, up to 89 mutations; instead of at least 90% sequence identity, up to 59 mutations; instead of at least 95% sequence identity, up to 29 mutations; instead of at least 96% sequence identity, up to 23 mutations; instead of at least 97% sequence identity, up to 17 mutations; instead of at least 98% sequence identity, up to 11 mutations; instead of at least 99% sequence identity, up to 5 mutations.

[0239] Preferably, the fiber variants have no A and preferably a P at amino acid position 181, no V and preferably an I at amino acid position 474, and/or no insertion of an S and preferably no amino acid insertion between amino acid positions 4 and 5.

[0240] In another embodiment, the adenovector further (i.e. next to the hexon and possibly the penton and/or fiber protein) encodes a VA RNA II non-coding RNA comprising a nucleotide sequence according to nucleotides 10724-10897 of SEQ ID NO: 1219, or a variant of the nucleotide sequence having at least 85% sequence identity. Alternatively or in addition, it may encode a VA RNA I non-coding RNA comprising a nucleotide sequence according to nucleotides 10492-10659 of SEQ ID NO: 1219, or a variant of the nucleotide sequence having at least 85% sequence identity. In a preferred embodiment, the VA RNA variants have at least 90%, and preferably at least 95%, 96%, 97%, 98% or 99% sequence identity. Alternative to the definition by a percentage level of sequence identity, the VA RNA variants can be defined to have a certain number of nucleotide mutations. The number of mutations is then as follows: instead of at least 85% sequence identity, up to 25 mutations in VA RNA I and up to 26 mutations in VA RNA II; instead of at least 90% sequence identity, up to 16 mutations in VA RNA I and up to 17 mutations in VA RNA II; instead of at least 95% sequence identity, up to 8 mutations in any VA RNA; instead of at least 96% sequence identity, up to 6 mutations in any VA RNA; instead of at least 97% sequence identity, up to 5 mutations in any VA RNA; instead of at least 98% sequence identity, up to 3 mutations in any VA RNA; instead of at least 99% sequence identity, up to 1 mutation in any VA RNA.

[0241] Preferably, the VA RNA II variant (a) no C at position 79 and/or no A at position 80, and preferably a T at position 79 and/or a G at position 80, and (b) no A at position 81, and preferably a G at position 81. The VA RNA I variant preferably has no G at position 80 and preferably has an A at position 80.

[0242] A VA RNA according to the invention leads to an improved adenovirus production.

[0243] It is preferred that the adenovector further comprises other adenoviral genes and nucleotide segments, which are adjacent to the hexon, penton and/or fiber gene in the adenovirus genome, using SEQ ID NO: 1219 as a reference. It is particularly preferred that the adenovector also comprises sequences required for packaging of the polynucleotide into an adenoviral particle.

[0244] Generally, it is preferred that the adenovector comprises at least one of the following:
[0245] (a) an adenoviral 5′-end, preferably an adenoviral 5′ inverted terminal repeat;
[0246] (b) an adenoviral E1a region, or a fragment thereof selected from among the 13S, 12S and 9S regions;
[0247] (c) an adenoviral E1b region, or a fragment thereof selected from among the group consisting of the small T, large T and IX regions;
[0248] (d) an adenoviral VA RNA region; or a fragment thereof selected from among the group consisting of the VA RNA I and VA RNA II regions;
[0249] (e) an adenoviral E2b region; or a fragment thereof selected from among the group consisting of the small pTP, Polymerase and IVa2 regions;
[0250] (f) an adenoviral L1 region, or a fragment thereof, said fragment encoding an adenoviral protein selected from the group consisting of the 28.1 kD protein, polymerase, agnoprotein, 52/55 kDa protein, and Ma protein;
[0251] (g) an adenoviral L2 region, or a fragment thereof, said fragment encoding an adenoviral protein selected from the group consisting of the penton protein as defined above, VII, V, and X protein;
[0252] (h) an adenoviral L3 region, or a fragment thereof, said fragment encoding an adenoviral protein selected from the group consisting of the VI protein, hexon protein as defined above, and endoprotease;
[0253] (i) an adenoviral E2a region, or a fragment thereof, said fragment encoding an adenoviral protein consisting of the DBP protein;
[0254] (j) an adenoviral L4 region, or a fragment thereof said fragment encoding an adenoviral protein selected from the group consisting of the 100 kD protein, the 22 kD homolog, the 33 kD homolog, and protein VIII;
[0255] (k) an adenoviral E3 region, or a fragment thereof selected from the group consisting of E3 ORF1, E3 ORF2, E3 ORF3, E3 ORF4, E3 ORF5, E3 ORF6, E3 ORF7, E3 ORF8 and E3 ORF5;
[0256] (l) an adenoviral L5 region, or a fragment thereof said fragment encoding the fiber protein as defined above;
[0257] (m) an adenoviral E4 region, or a fragment thereof selected from the group consisting of E4 ORF6/7, E4 ORF6, E4 ORF5, E4 ORF4, E4 ORF3, E4 ORF2, and E4 ORF1;
[0258] (n) an adenoviral 3′-end, preferably an adenoviral 3′ inverted terminal repeat; and/or
[0259] (o) an adenoviral E1 region.

[0260] These elements can be from the same adenovirus according to SEQ ID NO: 1219, or from a different adenovirus, in particular from one of a different species, e.g. a human adenovirus, to form a chimeric adenovirus.

[0261] In some embodiments of the adenovector it may be desirable that it does not comprise one or more genomic regions as outlined above (as in (a) to (m). In particular it may not comprise an E1, E3 and/or E4 region, and/or comprises an adenoviral gene which comprises a deletion and/or mutation which renders the at least one gene non-functional. In these preferred embodiments, the suitable adenoviral regions is modified to not include the aforementioned region(s)/gene(s) or to render the selected region(s)/gene(s) non-functional. One possibility to render them non-functional is to introduce one or more artificial stop-codons (e.g. TAA) into the open reading frame of these genes. Methods of rendering the virus replication-defective are well known in the art (see e.g. Brody et al, 1994 Ann NY Acad Sci., 716: 90-101). A deletion can make space to insert transgenes, preferably within an expression cassette, such as a minigene cassette. Furthermore, deletions can be used to generate adenoviral vectors which are incapable to replicate without the use of a packaging cell line or a helper virus as is well known in the art. Such a recombinant adenovirus comprising one or more of the specified gene/region deletions or loss-of-function mutations can provide a safer recombinant adenovirus for e.g. gene therapy or vaccination.

[0262] While the adenovector may not comprise at least one genomic region/gene as outlined herein (such as e.g. region E1, E3 and/or E4), specifically E1A, E1B, E2A, E2B, E3 ORF1, E3 ORF2, E3 ORF3, E3 ORF4, E3 ORF5, E3 ORF6, E3 ORF7, E3 ORF8, E3 ORF9, E4 ORF6/7, E4 ORF6, E4 ORF5, E4 ORF4, E4 ORF3, E4 ORF2 and/or E4 ORF1, preferably E1A, E1B, E2A, E2B, E3 and/or E4, and/or comprises an adenoviral gene which comprises a deletion and/or mutation which renders the at least one gene non-functional, it is desirable to retain an intact E1a and/or E1b region. Such an intact E1 region may be located in its native location in the adenoviral genome or placed in the site of a deletion in the native adenoviral genome (e.g., in the E3 region).

[0263] In a preferred embodiment, the adenovector further encodes one or more, preferably all of the following adenoviral proteins: protein VI, protein VIII, protein IX, protein Ma and protein IVa2.

[0264] An average person skilled in the art of adenoviruses is well aware of how to determine the open reading frames that encode for the above-specified adenoviral proteins. He is also aware of the structure of adenoviral genomes and can map, without undue burden, the individual adenoviral regions and ORFs outlined herein to any adenoviral genome.

[0265] The term “hexon protein” refers to the hexon (II) protein comprised in an adenovirus. A hexon protein or a variant thereof according to the invention has the same function as a hexon protein or a fragment thereof in an infectious adenovirus virion. Thus, an adenovirus comprising said hexon or variant thereof preferably as a capsid protein is capable of entering a host cell. A suitable method for generating variants of a hexon protein is described in U.S. Pat. No. 5,922,315. In this method, at least one loop region of the adenovirus hexon is changed with at least one loop region of another adenovirus serotype. It can be easily determined if a recombinant adenovirus can enter a host cell. For example, after contacting a host cell with the adenovirus, the recombinant host cell can be washed and lysed and it can be determined whether adenoviral RNA and/or DNA is found in the host cell using, e.g. an appropriate hybridization probe specific for adenoviral RNA and/or DNA. Alternatively or additionally, the host cell after having been brought into contact with the recombinant adenovirus may be washed, lysed and probed with adenovirus specific antibodies, e.g. using a Western blot. In yet another alternative, it is observed, e.g. in vivo, whether the host cell expresses a gene product, for example a fluorescent protein upon infection with a recombinant adenovirus that comprises a suitable expression cassette to express the gene product in the host cell.

[0266] The term “hypervariable region” (HVR) refers to domains with high sequence variation between strains, located at the solvent-exposed surface of the hexon protein, so exposed on the outside of the viral capsid. They are major determinants of neutralizing antibodies. HVRs can be identified, for example, by sequence alignment with other hexon proteins.

[0267] By “adenoviral penton protein” is meant the penton base (III) protein comprised in an adenovirus. An adenoviral penton protein is characterized in that it localizes to the corners of the icosahedral symmetry of the capsid. A penton protein or a variant thereof according to the invention has the same function as a penton protein in an infectious adenovirus virion. Thus, an adenovirus comprising said penton or variant thereof preferably as a capsid protein is capable of entering a host cell, which can be tested as described above. Further, a functional penton has an affinity to an adenoviral fiber protein. The average skilled person is well aware of how to test protein-protein affinities. To determine if a first protein is capable of binding a second protein, he may use, for example, a genetic yeast two-hybrid assay or a biochemical assay such as a pull-down, an enzyme-linked immunosorbent assay (ELISA), a fluorescence-activated cell sorting (FACS)-based assay or a Plasmon resonance assay. When using pull-down or Plasmon resonance assays, it is useful to fuse at least one of the proteins to an affinity tag such as HIS-tag, GST-tag or other, as is well known in the art of biochemistry.

[0268] The term “fiber protein” refers to the knobbed fiber (IV) protein comprised in an adenovirus. A fiber protein or a variant thereof according to the invention has the same function as a fiber protein or a fragment thereof in an infectious adenovirus virion. Thus, an adenovirus comprising said fiber or fiber variant preferably as a capsid protein is capable of entering a host cell, which can be tested as described above. Further, a functional fibre protein has an affinity to an adenoviral penton protein. Also, a functional adenoviral fiber protein in its glycosylated form is capable of trimerizing. Thus, it is also preferred that the variant is capable of being glycosylated and/or of forming a trimer. Affinity, including trimerization, can be tested as described above, and glycosylation assays are also well-known in the art.

[0269] The “VA (viral associated) RNA” is a type of non-coding found in adenovirus. It plays a role in regulating translation. There are two copies of this RNA called VAI or VA RNA I and VAII or VA RNA II. The two VA RNA genes are distinct genes in the adenovirus genome. VA RNA I is the major species with VA RN AII expressed at a lower level. Neither transcript is polyadenylated and both are transcribed by PolIII.

[0270] The term “identity” or “identical” in the context of polynucleotide, polypeptide or protein sequences refers to the number of residues in the two sequences that are identical when aligned for maximum correspondence. Specifically, the percent sequence identity of two sequences, whether nucleic acid or amino acid sequences, is the number of exact matches between two aligned sequences divided by the length of the shorter sequence and multiplied by 100. Alignment tools that can be used to align two sequences are well known to the person skilled in the art and can, for example, be obtained on the World Wide Web, e.g., Clustal Omega (http://www.ebi.ac.uk/Tools/msa/clustalo/) for polypeptide alignments or MUSCLE (http://www.ebi.ac.uk/Tools/msa/muscle/) or MAFFT (http://www.ebi.ac.uk/Tools/msa/mafft/) for polynucleotide alignments or WATER (http://www.ebi.ac.uk/Tools/psa/emboss_water/) for polynucleotide and polypeptide alignments. The alignments between two sequences may be carried out using default parameters settings, e.g. for MAFFT preferably: Matrix: Blosum62, Gap Open 1.53, Gap Extend 0.123, for WATER polynucleotides preferably: MATRIX: DNAFULL, Gap Open: 10.0, Gap Extend 0.5 and for WATER polypeptides preferably MATRIX: BLOSUM62, Gap Open: 10.0, Gap Extend: 0.5. Those skilled in the art understand that it may be necessary to introduce gaps in either sequence to produce a satisfactory alignment. The “best sequence alignment” is defined as the alignment that produces the largest number of aligned identical residues while having a minimal number of gaps. Preferably, it is a global alignment, which includes every residue in every sequence in the alignment.

[0271] The term “variant” refers, with respect to a polypeptide, generally to a modified version of the polypeptide, e.g. a mutation, so one or more amino acids of the polypeptide may be deleted, inserted, modified and/or substituted. Generally, the variant is functional, meaning that an adenovirus comprising the functional variant is capable of infecting a host cell. More specific functions are defined herein and have precedence over the general definition. A “mutation” or “amino acid mutation” can be an amino acid substitution, deletion and/or insertion (“and” may apply if there is more than one mutation). Preferably, it is a substitution (i.e. a conservative or non-conservative amino acid substitution), more preferably a conservative amino acid substitution. In some embodiments, a substitution also includes the exchange of a naturally occurring amino acid with a not naturally occurring amino acid. A conservative substitution comprises the substitution of an amino acid with another amino acid having a chemical property similar to the amino acid that is substituted. Preferably, the conservative substitution is a substitution selected from the group consisting of:
[0272] (i) a substitution of a basic amino acid with another, different basic amino acid;
[0273] (ii) a substitution of an acidic amino acid with another, different acidic amino acid;
[0274] (iii) a substitution of an aromatic amino acid with another, different aromatic amino acid;
[0275] (iv) a substitution of a non-polar, aliphatic amino acid with another, different non-polar, aliphatic amino acid; and
[0276] (v) a substitution of a polar, uncharged amino acid with another, different polar, uncharged amino acid.

[0277] A basic amino acid is preferably selected from the group consisting of arginine, histidine, and lysine. An acidic amino acid is preferably aspartate or glutamate. An aromatic amino acid is preferably selected from the group consisting of phenylalanine, tyrosine and tryptophane. A non-polar, aliphatic amino acid is preferably selected from the group consisting of glycine, alanine, valine, leucine, methionine and isoleucine. A polar, uncharged amino acid is preferably selected from the group consisting of serine, threonine, cysteine, proline, asparagine and glutamine. In contrast to a conservative amino acid substitution, a non-conservative amino acid substitution is the exchange of one amino acid with any amino acid that does not fall under the above-outlined conservative substitutions (i) through (v).

[0278] Means for determining sequence identity are described above.

[0279] Amino acids of a protein may also be modified, e.g. chemically modified. For example, the side chain or a free amino or carboxy-terminus of an amino acid of the protein or polypeptide may be modified by e.g. glycosylation, amidation, phosphorylation, ubiquitination, etc. The chemical modification can also take place in vivo, e.g. in a host-cell, as is well known in the art. For example, a suitable chemical modification motif, e.g. glycosylation sequence motif present in the amino acid sequence of the protein will cause the protein to be glycosylated. Unless a modification leads to a change in identity of a modified amino acid (e.g. a substitution or deletion), a modified polypeptide is within the scope of polypeptide as mentioned, i.e. it is not a variant as defined herein.

[0280] The term “variant” refers, with respect to a polynucleotide, generally to a modified version of the polynucleotide, e.g. a mutation, so one or more nucleotides of the polynucleotide may be deleted, inserted, modified and/or substituted. Generally, the variant is functional, meaning that an adenovirus comprising the functional variant is capable of infecting a host cell. More specific functions are defined herein and have precedence over the general definition. A “mutation” can be a nucleotide substitution, deletion and/or insertion (“and” may apply if there is more than one mutation). Preferably, it is a substitution, more preferably it causes an amino acid substitution, most preferably a conservative amino acid substitution.

[0281] Generally, it is preferred that all expression vectors of the collection of expression vectors, i.e. the collection of expression vectors comprising nucleic acids encoding all FSPs, mFSP and antigenic fragments thereof of the respective CVP are of one type, e.g. a replication competent adenovirus. In the embodiment of the invention in which different layouts of the same CVP or nucleic acids encoding this are used, each layout will be comprised in a separate collection of expression vectors. Thus, each layout may be comprised in the same expression vector or in different expression vectors. The latter is preferred in those instances in which the expression vector itself is antigenic in the patient. Thus, the change of the type of expression vector between two or more repeat administrations of the same CVP, preferably in different layouts increase the chance that the CVP is expressed in the patient.

[0282] The present invention also relates to a CVP of the fourth or fifth aspect of the present invention, a collection of nucleic acids of the fourth or sixth aspect of the present invention, or an expression vector collection of the seventh aspect of the present invention, for use in medicine.

[0283] The present invention also relates to pharmaceutical composition comprising a CVP of the fourth or fifth aspect of the present invention, a collection of nucleic acids of the fourth or sixth aspect of the present invention, or an expression vector collection of the seventh aspect of the present invention.

[0284] In case that different layouts of the same CVP, of nucleic acids encoding such different layouts of the same CVP or expression vectors comprising such nucleic acids with different layouts are used in a homologous or heterologous prime-boost administration regimen (see below) the term “pharmaceutical composition” also covers two physically separated compositions that allow separate administration of the same CVP, of nucleic acids encoding such different layouts of the same CVP or expression vectors comprising such nucleic acids with different layouts.

[0285] In preferred embodiments the pharmaceutical composition further comprises a pharmaceutically acceptable carrier and/or excipient and optionally one or more additional active substances. Preferably, the composition of the fifth aspect contains a therapeutically effective amount of the compound, preferably in purified form, together with a suitable amount of carrier and/or excipient so as to provide the form for proper administration to the patient. The formulation should suit the mode of administration.

[0286] The pharmaceutical compositions can take the form of solutions, suspensions, emulsion, tablets, pills, capsules, powders, sustained-release formulations and the like. The pharmaceutical composition can be formulated as a suppository, with traditional binders and carriers such as triglycerides.

[0287] For preparing pharmaceutical compositions of the present invention, pharmaceutically acceptable carriers can be either solid or liquid. Solid form compositions include powders, tablets, pills, capsules, lozenges, cachets, suppositories, and dispersible granules. A solid excipient can be one or more substances, which may also act as diluents, flavouring agents, binders, preservatives, tablet disintegrating agents, or an encapsulating material. In powders, the excipient is preferably a finely divided solid, which is in a mixture with the finely divided inhibitor of the present invention. In tablets, the active ingredient is mixed with the carrier having the necessary binding properties in suitable proportions and compacted in the shape and size desired. Suitable excipients are magnesium carbonate, magnesium stearate, talc, sugar, lactose, pectin, dextrin, starch, gelatin, tragacanth, methylcellulose, sodium carboxymethylcellulose, a low melting wax, cocoa butter, and the like. For preparing suppositories, a low melting wax, such as a mixture of fatty acid glycerides or cocoa butter, is first melted and the active component is dispersed homogeneously therein, as by stirring. The molten homogeneous mixture is then poured into convenient sized moulds, allowed to cool, and thereby to solidify. Tablets, powders, capsules, pills, cachets, and lozenges can be used as solid dosage forms suitable for oral administration.

[0288] Liquid form compositions include solutions, suspensions, and emulsions, for example, water, saline solutions, aqueous dextrose, glycerol solutions or water/propylene glycol solutions. For parenteral injections (e.g. intravenous, intraarterial, intraosseous infusion, intramuscular, subcutaneous, intraperitoneal, intradermal, and intrathecal injections), liquid preparations can be formulated in solution in, e.g. aqueous polyethylene glycol solution. A saline solution is a preferred carrier when the pharmaceutical composition is administered intravenously.

[0289] Preferably, the pharmaceutical composition is in unit dosage form. In such form the composition may be subdivided into unit doses containing appropriate quantities of the active component. The unit dosage form can be a packaged composition, the package containing discrete quantities of the composition, such as packaged tablets, capsules, and powders in vials or ampoules. Also, the unit dosage form can be a capsule, an injection vial, a tablet, a cachet, or a lozenge itself, or it can be the appropriate number of any of these in packaged form.

[0290] The composition, if desired, can also contain minor amounts of wetting or emulsifying agents, or pH buffering agents.

[0291] Furthermore, such pharmaceutical composition may also comprise other pharmacologically active substance such as but not limited to adjuvants and/or additional active ingredients. Adjuvants in the context of the present invention include but are not limited to inorganic adjuvants, organic adjuvants, oil-based adjuvants, cytokines, particulate adjuvants, virosomes, bacterial adjuvants, synthetic adjuvants, or synthetic polynucleotides adjuvants.

[0292] In an eighth aspect, the present invention relates to a CVP of the fourth or fifth aspect of the present invention, a collection of nucleic acids of the fourth of sixth aspect of the present invention, or an expression vector collection of the seventh aspect of the present invention, for use in prophylaxis or treatment of a patient with a cancer comprising cancer cells with an MSI phenotype or being at risk of developing such cancer, wherein the cancer is preferably selected from the group consisting of colorectal cancer, gastric cancer, endometrial cancer, small intestine cancer, hepatobiliary tract cancer, liver cancer, neuroendocrine cancers, cervical cancer, ovarian cancer, uterine sarcomas, brain cancer and skin cancer

[0293] As outlined above one particular advantage of the universal vaccine of the present invention is the fact that it provides prophylaxis or therapy of more than just one cancer type. Accordingly, it is preferred according to the eighth aspect to provide prophylaxis or therapy for at least two types of MSI cancers, more preferably at least three types of MSI cancers. Preferably, colorectal cancer, gastric cancer, endometrial cancer, small intestine cancer, hepatobiliary tract cancer, liver cancer, neuroendocrine cancers, cervical cancer, ovarian cancer, uterine sarcomas, brain cancer and skin cancer.

[0294] Prophylaxis is in the context of the present invention preferably for patients known to be at risk of developing MSI cancers according to clinical guidelines, including patients with germline mutations in genes involved in the mismatch repair system (MMR) such as MLH-1, MSH-2, MSH-6, PMS2 and TACSTD1/EPCAM. Treatment is for patients with cancers at all stages (I-IV), arising in any tissue after diagnosis of MSI status according to most recent clinical guidelines. The use of such vaccine is intended for treatment of cancers with an MSI status that can be either spontaneous or pharmacologically induced.

[0295] In many cases, a single administration of the CVP is not sufficient to generate the number of long-lasting immune cells which is required for effective protection against tumor diseases or for therapeutically treating a tumor disease. Consequently, repeated challenge with a biological preparation specific for a specific disease is required in order to establish lasting and protective immunity against said disease or to cure a given disease. An administration regimen comprising the repeated administration of a CVP, the collection of nucleic acids encoding such CVP or a collection of expression vectors comprising such nucleic acid is referred to in the present as “prime-boost vaccination regimen”. Preferably, a prime-boost vaccination regimen involves at least two administrations of a CVP, the collection of nucleic acids encoding such CVP or a collection of expression vectors comprising such nucleic acid. The first administration of the CVP, the collection of nucleic acids encoding such CVP or a collection of expression vectors comprising such nucleic acid is referred to as “priming” and any subsequent administration of the same CVP, the collection of nucleic acids encoding such CVP or a collection of expression vectors comprising such nucleic acid is referred to as “boosting”. It is understood from above explanation that the same CVP may nevertheless be administered in different layouts in each subsequent administrations of the CVP, the collection of nucleic acids encoding such CVP or a collection of expression vectors comprising such nucleic acid.

[0296] Thus, in a preferred embodiment of the present invention the prime-boosting vaccination regimen involves one administration of the CVP, the collection of nucleic acids encoding such CVP or a collection of expression vectors comprising such nucleic acid for priming the immune response and at least one subsequent administration for boosting the immune response. It is to be understood that 2, 3, 4 or even 5 administrations for boosting the immune response are also contemplated by the present invention.

[0297] The period of time between prime and boost is, preferably, 1 week, 2 weeks, 4 weeks, 6 weeks or 8 weeks. More preferably, it is 4 weeks or 8 weeks. If more than one boost is performed, the subsequent boost is, preferably, administered 1 week, 2 weeks, 4 weeks, 6 weeks or 8 weeks after the preceding boost. More preferably, the interval between any two boosts is 4 weeks or 8 weeks.

[0298] The prime-boost vaccination regimens of the present invention may be homologous or heterologous. In homologous prime-boost regimens both the priming and the at least one boosting is performed using the same means of administration of the CVP, the collection of nucleic acids encoding such CVP or a collection of expression vectors comprising such nucleic acid. In heterologous prime-boosting regimens a different means for priming and for boosting the immune response are used. In the context of the present invention, a heterologous prime-boosting regimen could, e.g. comprise a poxviral vector for the priming of an immune response and a different expression vector or the CPV for the boosting of the immune response.

[0299] In one preferred embodiment of the present invention the prime-boosting vaccination regimen is homologous and in another preferred embodiment of the present invention the prime-boosting vaccination regimen is heterologous.

[0300] Accordingly, in one aspect the present invention relates to a collection of nucleic acids of the fourth or sixth aspect of the present invention and/or a expression vector collection of the seventh aspect of the present invention for use in prophylaxis or treatment of a patient with a cancer comprising cancer cells with an MSI phenotype or being at risk of developing such cancer, wherein the collection of nucleic acids and/or the expression vector collection is administered in a heterologous prime-boost vaccination scheme, preferably the prime is with an adenovirus vector and the one or more boosts with a poxviral vector, preferably an MVA vector.

### EXAMPLES

### Example 1: Selection of Mononucleotide Repeat (MNR) Mutations in Protein-Coding Genes of MSI Tumor Samples

[0301] Mutation Annotation Format (MAF) files based on whole exome sequence data (release date 4.0—Oct. 31, 2016) and available from the TCGA data portal (https://gdc-portal.nci.nih.gov/) were analyzed for the presence of frameshift mutations (FSM) in MNRs equal or longer than 6 nucleotides located within protein-coding segments of exomes of protein-coding genes. Only tumors with a MSI phenotype as defined in the TCGA sample annotation data were considered in the analysis. This group comprised a total 320 tumor and matched normal control samples, corresponding to 69 MSI-high (MSI-H) colorectal (CRC), 85 MSI gastric and 166 MSI endometrial (EC) cancers. In a second filtering step, only FSMs derived from a 1 nucleotide deletion were accepted, as this type of FSM is the most frequently observed in CRC and EC tumors (1). The resulting list was further refined by accepting only those FSMs fulfilling the following criteria: (i) the number of reads harboring the mutation was significantly higher in the tumor compared to the matched normal sample (FDR-corrected Fisher-test p-value ≤0.05); (ii) the allele frequency of the FSM in the matched normal sample was ≤25%. The remaining FSMs were filtered further by retaining only those FSMs that were present in at least 5% of tumor samples in one of the three analyzed tumor types (CRC, gastric, EC). In a final selection step, FSMs that fell in the following categories were excluded because deemed inappropriate for a vaccine: (i) presence of the FSM in ≥2% of samples from a collection of normal samples (EXAC database http://exac.broadinstitute.org/) and/or (ii) the mRNA expression (RSEM log₂ expression value) of the FSM-carrying gene was within the lower 20 percentile value of all expressed protein-coding genes (TCGA gene-level mRNA expression data) considering all three tumor types (CRC, EC and gastric). The list thus obtained comprised 1283 FSMs and represents the CFSM for these tumors.

### Example 2: Selection of a List of Frameshift Peptides with Acceptable Properties

[0302] Each of the FSMs of the CFSM selected in Example 1 was then mapped onto the corresponding mRNA sequence (or sequences) from the NCBI REFSEQ database using ANNOVAR (Wang K, et al. (2010) NAR, 38:e164) and both the wild-type (wt) and the resulting mutated mRNA were translated into proteins. Comparison of the wt and mutated protein sequences allowed determining the amino acid (aa) sequence of the corresponding frame shift peptide (FSP). When an FSM generated multiple FSPs with different length and/or aa sequence due to the presence of multiple mRNA isoforms, all resulting FSPs were retained. The resulting list was filtered to exclude all FSPs shorter than 4 aa in that unable to yield potential CD8 T neo-epitopes.

[0303] Furthermore, the amino acid sequence of FSPs to be included in the CVP was modified by the addition or deletion of amino acids (or a FSP that did not fulfill certain criterions was excluded from after modification), if they fulfilled certain criterions: (i) if the FSP is shorter than 10 aa, 4 wt aa naturally occurring immediately N-terminally of the amino acid encoded by the FC is added to the N-terminus of the FSP to ensure the peptide (which is referred to as mFSP since it differs from the FSP as defined in the context of the present invention to be the complete translation product of the protein-encoding segment of a nucleic acid comprising a FSM starting from the codon encoding the first amino acid that is different relative to the translation product of the corresponding wild type (wt) nucleic acid without the FSM) that reached the minimum length of a putative CD8 T cell neo-epitope (8-10mer). Amino acid stretches shared between multiple FSPs deriving from the same FSM were only retained in the longest FSP, i.e. in the shorter FSPs these amino acid stretches were deleted. In a final step, any segment of 8 or more continuous amino acids also present in the wt human proteome (NCBI REFSEQ database) was removed from the FSPs to minimize the risk of inducing autoimmunity. If, after exclusion of the wt segment, the resulting FSP was shorter than 4 aa, it was removed from the list. The final group of FSPs thus obtained comprises of 1087 amino acid sequences (SEQ ID NO: 1 to 1087) encoded by 1059 FSMs (Table 1) and is referred to as CVP.

TABLE 1
For each of the 1087 FSPs, the SEQ ID NO
is reported together with the genomic coordinates
(hg19 assembly) of the FSM generating the FSP.

| SEQ | Genomic |
|---|---|
| ID | Coordinate |
| NO | FSM |
| 1 | chr18:34205516 |
| 2 | chr18:34205516 |
| 3 | chr1:6257785 |
| 4 | chr2:148683686 |
| 5 | chr17:56435161 |
| 6 | chr3:51417604 |
| 7 | chr5:79970915 |
| 8 | chr18:57013194 |
| 9 | chr5:145647320 |
| 10 | chr11:77784147 |
| 11 | chr13:115057211 |
| 12 | chr11:126137087 |
| 13 | chr2:165551296 |
| 14 | chr6:80751897 |
| 15 | chr7:151874148 |
| 16 | chr12:122242658 |
| 17 | chr6:108214755 |
| 18 | chr19:49850473 |
| 19 | chr7:77423460 |
| 20 | chr8:103289349 |
| 21 | chr3:100039736 |
| 22 | chr1:27621108 |
| 23 | chr3:136573486 |
| 24 | chr1:14108749 |
| 25 | chr14:24040436 |
| 26 | chr16:10867203 |
| 27 | chr12:64812755 |
| 28 | chr17:48433967 |
| 29 | chr1:231131567 |
| 30 | chr6:71508370 |
| 31 | chr19:49458971 |
| 32 | chr10:78729786 |
| 33 | chr11:62649529 |
| 34 | chr1:160589601 |
| 35 | chr3:114058003 |
| 36 | chr3:20216050 |
| 37 | chr10:70182521 |
| 38 | chr9:96422612 |
| 39 | chr5:140049102 |
| 40 | chr3:183665257 |
| 41 | chr5:145886723 |
| 42 | chr15:79750586 |
| 43 | chr1:45407182 |
| 44 | chr4:3430399 |
| 45 | chr1:28785730 |
| 46 | chr11:118220583 |
| 47 | chr2:203922058 |
| 48 | chrX:37312611 |
| 49 | chr10:111893350 |
| 50 | chr10:93601946 |
| 51 | chr1:155308000 |
| 52 | chr6:131481276 |
| 53 | chr1:23240246 |
| 54 | chr6:139097330 |
| 55 | chr2:207174428 |
| 56 | chr15:56736723 |
| 57 | chr21:38524243 |
| 58 | chr2:203420130 |
| 59 | chr10:890939 |
| 60 | chr5:131931452 |
| 61 | chr14:45693722 |
| 62 | chr20:49508204 |
| 63 | chr1:65306997 |
| 64 | chr2:165365288 |
| 65 | chr11:77920856 |
| 66 | chr17:57247171 |
| 67 | chr6:158508009 |
| 68 | chr3:142274740 |
| 69 | chr1:91967357 |
| 70 | chr16:19725706 |
| 71 | chr1:74575213 |
| 72 | chr2:178988920 |
| 73 | chr8:124384893 |
| 74 | chr1:27105931 |
| 75 | chr12:57422573 |
| 76 | chr3:157081227 |
| 77 | chr17:49077041 |
| 78 | chr17:49077041 |
| 79 | chr17:42756253 |
| 80 | chr21:16338330 |
| 81 | chr17:20108263 |
| 82 | chr9:35059647 |
| 83 | chr1:93667516 |
| 84 | chr15:64967247 |
| 85 | chr1:204228411 |
| 86 | chr17:7798765 |
| 87 | chr6:163899920 |
| 88 | chr13:50235209 |
| 89 | chrX:129190011 |
| 90 | chr5:64023941 |
| 91 | chr2:74687410 |
| 92 | chr7:100802405 |
| 93 | chr7:8198251 |
| 94 | chr15:42742957 |
| 95 | chr10:98336475 |
| 96 | chr9:115806416 |
| 97 | chr1:89473442 |
| 98 | chr17:55028016 |
| 99 | chr1:240072444 |
| 100 | chr7:108205526 |
| 101 | chr5:35705894 |
| 102 | chr1:109560141 |
| 103 | chr17:4875738 |
| 104 | chr1:35846960 |
| 105 | chr19:1430254 |
| 106 | chr19:48197891 |
| 107 | chr1:237969494 |
| 108 | chr3:122433232 |
| 109 | chr10:90682146 |
| 110 | chr1:24078404 |
| 111 | chr16:4862229 |
| 112 | chr21:34882122 |
| 113 | chr10:64159513 |
| 114 | chrX:13764946 |
| 115 | chr5:147499875 |
| 116 | chr5:147499875 |
| 117 | chr5:147499875 |
| 118 | chr11:71948748 |
| 119 | chr2:172549339 |
| 120 | chr2:37454908 |
| 121 | chr5:36985083 |
| 122 | chrX:154157686 |
| 123 | chr10:29760116 |
| 124 | chr3:41860985 |
| 125 | chr12:416953 |
| 126 | chr1:156642804 |
| 127 | chr4:15067858 |
| 128 | chr15:52901069 |
| 129 | chr6:90432675 |
| 130 | chr4:114823494 |
| 131 | chr1:204924033 |
| 132 | chr2:196788374 |
| 133 | chr6:36867371 |
| 134 | chr16:19722724 |
| 135 | chr7:2968323 |
| 136 | chr4:15995680 |
| 137 | chr2:27248517 |
| 138 | chr11:32635951 |
| 139 | chr9:5968044 |
| 140 | chr12:6924043 |
| 141 | chr5:162917426 |
| 142 | chr2:71191573 |
| 143 | chr19:55815036 |
| 144 | chr13:35733663 |
| 145 | chr15:81271633 |
| 146 | chr15:55631503 |
| 147 | chr1:147091501 |
| 148 | chr17:26653807 |
| 149 | chr18:45567076 |
| 150 | chr11:107325228 |
| 151 | chr9:136918529 |
| 152 | chr2:97749725 |
| 153 | chr1:151318741 |
| 154 | chr19:50434211 |
| 155 | chr9:131591120 |
| 156 | chr12:88524079 |
| 157 | chr18:46474795 |
| 158 | chr18:46474795 |
| 159 | chr3:180666228 |
| 160 | chr11:16822525 |
| 161 | chr16:89951020 |
| 162 | chr20:50400983 |
| 163 | chr2:103149137 |
| 164 | chr1:150530506 |
| 165 | chr11:118969143 |
| 166 | chr6:160485488 |
| 167 | chr1:25775375 |
| 168 | chr11:4703475 |
| 169 | chr11:75694431 |
| 170 | chr12:123794283 |
| 171 | chr6:15496722 |
| 172 | chr18:21750331 |
| 173 | chr11:31812317 |
| 174 | chr3:57509313 |
| 175 | chr1:40756543 |
| 176 | chr5:179149920 |
| 177 | chr13:33344580 |
| 178 | chr9:18680350 |
| 179 | chr2:54093345 |
| 180 | chr13:34398063 |
| 181 | chr5:176675269 |
| 182 | chr13:27255387 |
| 183 | chr1:49201967 |
| 184 | chr11:111953289 |
| 185 | chr2:234394237 |
| 186 | chr1:100534122 |
| 187 | chr2:44145165 |
| 188 | chr8:74507471 |
| 189 | chr11:71948209 |
| 190 | chr20:23066469 |
| 191 | chr17:40939870 |
| 192 | chr17:76046980 |
| 193 | chr9:34257623 |
| 194 | chr3:182602674 |
| 195 | chr13:53049034 |
| 196 | chr5:143853531 |
| 197 | chr1:203786225 |
| 198 | chr7:91936914 |
| 199 | chr13:109661386 |
| 200 | chr1:169366580 |
| 201 | chr6:101296336 |
| 202 | chr7:102584993 |
| 203 | chr1:1290110 |
| 204 | chr3:77657038 |
| 205 | chr7:1037311 |
| 206 | chr21:33073336 |
| 207 | chr18:12699829 |
| 208 | chr19:12430217 |
| 209 | chrX:48887952 |
| 210 | chr5:130815369 |
| 211 | chr11:47196853 |
| 212 | chr11:47196853 |
| 213 | chr2:148657041 |
| 214 | chrX:302052 |
| 215 | chr6:80751910 |
| 216 | chr8:31001132 |
| 217 | chr9:88937823 |
| 218 | chr9:88937823 |
| 219 | chr1:108700183 |
| 220 | chr16:67645339 |
| 221 | chr10:70156583 |
| 222 | chr11:62381084 |
| 223 | chr6:96999786 |
| 224 | chr6:31323363 |
| 225 | chr3:108229398 |
| 226 | chr17:79803764 |
| 227 | chr22:42564716 |
| 228 | chr20:31022442 |
| 229 | chr2:207174869 |
| 230 | chr3:154032978 |
| 231 | chr1:67390426 |
| 232 | chr20:25422397 |
| 233 | chr16:29825016 |
| 234 | chr21:33074655 |
| 235 | chr6:76599858 |
| 236 | chr6:31504446 |
| 237 | chr7:94185017 |
| 238 | chr2:206166298 |
| 239 | chr2:95815035 |
| 240 | chr17:67125767 |
| 241 | chr10:61823946 |
| 242 | chr2:169699563 |
| 243 | chr7:50531075 |
| 244 | chr1:27106804 |
| 245 | chr20:56227349 |
| 246 | chr20:58452519 |
| 247 | chr12:122720397 |
| 248 | chr7:150698398 |
| 249 | chr16:28883208 |
| 250 | chr11:65836146 |
| 251 | chr15:91304139 |
| 252 | chr3:58089788 |
| 253 | chr9:134007993 |
| 254 | chr20:57769140 |
| 255 | chr10:94243045 |
| 256 | chr13:51530587 |
| 257 | chr10:75560464 |
| 258 | chr11:108216477 |
| 259 | chr22:50898756 |
| 260 | chr17:25910016 |
| 261 | chr11:95555113 |
| 262 | chr11:95555113 |
| 263 | chr18:43459143 |
| 264 | chr11:74336609 |
| 265 | chr12:57921732 |
| 266 | chr2:201436992 |
| 267 | chr9:39073899 |
| 268 | chr19:21992087 |
| 269 | chr6:84634231 |
| 270 | chr20:36361416 |
| 271 | chr12:98921672 |
| 272 | chr14:35585935 |
| 273 | chr1:85331665 |
| 274 | chr2:170665008 |
| 275 | chr6:33178990 |
| 276 | chr12:51392999 |
| 277 | chr4:56765965 |
| 278 | chr16:58589340 |
| 279 | chr11:6662142 |
| 280 | chr15:28200305 |
| 281 | chrX:10188763 |
| 282 | chr4:118005517 |
| 283 | chr2:24086326 |
| 284 | chr19:19906351 |
| 285 | chr2:152112048 |
| 286 | chr5:131944382 |
| 287 | chr11:119213688 |
| 288 | chr19:38028415 |
| 289 | chr5:57753012 |
| 290 | chr12:49443667 |
| 291 | chr16:15131990 |
| 292 | chr8:22472975 |
| 293 | chrX:56591874 |
| 294 | chr20:18287008 |
| 295 | chr20:18287008 |
| 296 | chr20:18287008 |
| 297 | chr1:1116223 |
| 298 | chr22:46931227 |
| 299 | chr12:95650969 |
| 300 | chr2:240002823 |
| 301 | chr2:175213713 |
| 302 | chr3:195595229 |
| 303 | chr12:57572242 |
| 304 | chr4:3432431 |
| 305 | chr12:27950769 |
| 306 | chr6:107391602 |
| 307 | chr1:16462199 |
| 308 | chr3:169700664 |
| 309 | chr14:93761193 |
| 310 | chr19:6477251 |
| 311 | chr14:52481919 |
| 312 | chr6:109850222 |
| 313 | chr9:138379043 |
| 314 | chr6:13206135 |
| 315 | chr2:196866535 |
| 316 | chr1:27876869 |
| 317 | chr1:247319909 |
| 318 | chr3:50099450 |
| 319 | chr18:29453418 |
| 320 | chr22:43213780 |
| 321 | chr11:58962827 |
| 322 | chr4:153864507 |
| 323 | chr2:86831015 |
| 324 | chr12:57883053 |
| 325 | chr17:73498973 |
| 326 | chr4:164428219 |
| 327 | chr2:197649614 |
| 328 | chr19:38899416 |
| 329 | chr2:1652960 |
| 330 | chr17:16285785 |
| 331 | chr16:77356311 |
| 332 | chr14:102718303 |
| 333 | chr4:170428203 |
| 334 | chr12:58025103 |
| 335 | chr14:31074772 |
| 336 | chr21:33949091 |
| 337 | chr16:66599895 |
| 338 | chr4:170613460 |
| 339 | chr4:170613460 |
| 340 | chr1:36935323 |
| 341 | chr3:15084406 |
| 342 | chr7:158704353 |
| 343 | chr17:28505167 |
| 344 | chr7:115594657 |
| 345 | chr18:10741064 |
| 346 | chr2:99778781 |
| 347 | chr13:114542718 |
| 348 | chr12:31448178 |
| 349 | chr7:91603085 |
| 350 | chr5:35874637 |
| 351 | chr6:80720630 |
| 352 | chr17:7751137 |
| 353 | chr20:45875072 |
| 354 | chr8:67488453 |
| 355 | chr15:62244050 |
| 356 | chr3:48465485 |
| 357 | chr4:2242634 |
| 358 | chr4:107156505 |
| 359 | chr11:61539013 |
| 360 | chr2:152320541 |
| 361 | chr2:201683505 |
| 362 | chr2:201683505 |
| 363 | chr1:65339111 |
| 364 | chr7:92760738 |
| 365 | chr13:95696016 |
| 366 | chr10:13151192 |
| 367 | chr11:125505378 |
| 368 | chr10:115662308 |
| 369 | chr1:68171151 |
| 370 | chr1:155152179 |
| 371 | chr16:88504203 |
| 372 | chr1:19467923 |
| 373 | chr9:37357250 |
| 374 | chr16:88691141 |
| 375 | chr11:32637520 |
| 376 | chr17:63532585 |
| 377 | chr2:210887680 |
| 378 | chr3:57276921 |
| 379 | chr13:32954023 |
| 380 | chr16:9857380 |
| 381 | chr16:30007665 |
| 382 | chr5:72264329 |
| 383 | chr9:131019390 |
| 384 | chr5:43173517 |
| 385 | chr12:102108338 |
| 386 | chr17:67218780 |
| 387 | chr2:201437004 |
| 388 | chr16:3817721 |
| 389 | chr4:40144449 |
| 390 | chr15:59186310 |
| 391 | chr7:150656679 |
| 392 | chr6:74351590 |
| 393 | chr19:18887993 |
| 394 | chr12:56347514 |
| 395 | chr5:60822215 |
| 396 | chr5:140502487 |
| 397 | chr8:133150233 |
| 398 | chr5:137627690 |
| 399 | chr1:10177642 |
| 400 | chr2:71337212 |
| 401 | chr9:17135271 |
| 402 | chr11:17352468 |
| 403 | chr16:53263000 |
| 404 | chr20:37146233 |
| 405 | chrX:153042691 |
| 406 | chr3:142775212 |
| 407 | chr9:115941002 |
| 408 | chr5:96315249 |
| 409 | chr14:92472698 |
| 410 | chr5:109940905 |
| 411 | chr1:158058203 |
| 412 | chr19:58264857 |
| 413 | chr8:124140521 |
| 414 | chr3:133670083 |
| 415 | chr9:69421905 |
| 416 | chr17:7193637 |
| 417 | chr1:62253580 |
| 418 | chr17:33749493 |
| 419 | chr8:70488249 |
| 420 | chr14:65035126 |
| 421 | chr1:113471890 |
| 422 | chr15:91019925 |
| 423 | chr19:7987519 |
| 424 | chr6:52334208 |
| 425 | chr6:90576391 |
| 426 | chr10:131666125 |
| 427 | chr3:167507159 |
| 428 | chr20:40739003 |
| 429 | chr5:137505021 |
| 430 | chr16:29818054 |
| 431 | chr10:116730192 |
| 432 | chr4:160253755 |
| 433 | chrX:70327614 |
| 434 | chr10:116887435 |
| 435 | chr8:67716612 |
| 436 | chr15:76958036 |
| 437 | chr1:226352491 |
| 438 | chr13:77581683 |
| 439 | chr14:23745310 |
| 440 | chr22:38895455 |
| 441 | chr6:71546674 |
| 442 | chr11:63313709 |
| 443 | chr19:5587282 |
| 444 | chr13:20638677 |
| 445 | chr15:55912892 |
| 446 | chr9:138715800 |
| 447 | chr12:50025258 |
| 448 | chr10:13696452 |
| 449 | chr6:87969484 |
| 450 | chr12:88449444 |
| 451 | chr10:100186987 |
| 452 | chr19:4816465 |
| 453 | chr13:103524612 |
| 454 | chr4:38691476 |
| 455 | chr2:173368931 |
| 456 | chr11:124845049 |
| 457 | chr16:14346300 |
| 458 | chr11:6629392 |
| 459 | chr12:57921401 |
| 460 | chr15:41029894 |
| 461 | chr16:77775744 |
| 462 | chr20:31041556 |
| 463 | chr14:88940113 |
| 464 | chr4:25849258 |
| 465 | chr8:95531563 |
| 466 | chr20:39990829 |
| 467 | chr2:74763924 |
| 468 | chr8:24257686 |
| 469 | chr19:49218106 |
| 470 | chr7:100479332 |
| 471 | chr17:80615786 |
| 472 | chr17:17046886 |
| 473 | chr3:42679486 |
| 474 | chr11:94230059 |
| 475 | chr19:49982166 |
| 476 | chr4:169317264 |
| 477 | chr1:149884981 |
| 478 | chr17:55028118 |
| 479 | chr1:169790867 |
| 480 | chr4:39515753 |
| 481 | chr17:26449740 |
| 482 | chr2:219449364 |
| 483 | chr1:237024474 |
| 484 | chr19:36223002 |
| 485 | chr1:156694023 |
| 486 | chr11:64004663 |
| 487 | chr19:20228702 |
| 488 | chr8:68992721 |
| 489 | chr18:13746253 |
| 490 | chr1:151774033 |
| 491 | chr9:103111633 |
| 492 | chr9:106885501 |
| 493 | chr2:39074185 |
| 494 | chr7:99817848 |
| 495 | chr12:6711546 |
| 496 | chr12:6711546 |
| 497 | chr1:156715104 |
| 498 | chr19:39330959 |
| 499 | chr10:81072446 |
| 500 | chr7:6196443 |
| 501 | chr7:100855927 |
| 502 | chr12:107937778 |
| 503 | chr2:172546762 |
| 504 | chr11:121475905 |
| 505 | chr12:117977605 |
| 506 | chr17:44109601 |
| 507 | chr7:21939669 |
| 508 | chr8:133826909 |
| 509 | chrX:70472854 |
| 510 | chr1:26671971 |
| 511 | chr11:33117910 |
| 512 | chr7:92146721 |
| 513 | chr13:45008838 |
| 514 | chr3:53889347 |
| 515 | chr2:163134716 |
| 516 | chr13:23912864 |
| 517 | chr20:30789952 |
| 518 | chr6:114292040 |
| 519 | chr1:168054869 |
| 520 | chr2:55176077 |
| 521 | chr15:49776644 |
| 522 | chr18:19154750 |
| 523 | chr7:19738024 |
| 524 | chr1:93599280 |
| 525 | chr5:131676327 |
| 526 | chr2:109086477 |
| 527 | chr8:99168468 |
| 528 | chr3:185212518 |
| 529 | chr6:102503432 |
| 530 | chr6:102503432 |
| 531 | chr6:102503432 |
| 532 | chr16:50745399 |
| 533 | chr16:30736371 |
| 534 | chr10:63958149 |
| 535 | chr1:100889837 |
| 536 | chr1:46752129 |
| 537 | chr22:18300932 |
| 538 | chr19:10433828 |
| 539 | chr6:33263965 |
| 540 | chr19:45556129 |
| 541 | chr18:12370885 |
| 542 | chr1:28920547 |
| 543 | chr1:197145703 |
| 544 | chr12:121432118 |
| 545 | chr8:144621235 |
| 546 | chr7:42005573 |
| 547 | chr16:72991758 |
| 548 | chr12:54645832 |
| 549 | chr6:4031881 |
| 550 | chr1:1961598 |
| 551 | chr13:114523858 |
| 552 | chr10:52005194 |
| 553 | chr11:45948373 |
| 554 | chr19:58084579 |
| 555 | chr1:52305912 |
| 556 | chr1:52305912 |
| 557 | chr2:204305619 |
| 558 | chr7:107395909 |
| 559 | chr13:46543661 |
| 560 | chr1:110300580 |
| 561 | chr12:8281937 |
| 562 | chr16:4944500 |
| 563 | chr15:86287017 |
| 564 | chr4:142143532 |
| 565 | chr12:56559113 |
| 566 | chr12:110344435 |
| 567 | chr5:127610311 |
| 568 | chr10:127697969 |
| 569 | chr12:88512305 |
| 570 | chr3:142030643 |
| 571 | chr7:94174999 |
| 572 | chr19:33167776 |
| 573 | chr9:33385690 |
| 574 | chr14:94088050 |
| 575 | chr2:211018375 |
| 576 | chr14:27066542 |
| 577 | chr10:89717770 |
| 578 | chr2:203168133 |
| 579 | chr12:123351892 |
| 580 | chr1:36636626 |
| 581 | chr4:140291445 |
| 582 | chr13:100925452 |
| 583 | chr13:79918807 |
| 584 | chr16:28909714 |
| 585 | chr4:113570754 |
| 586 | chr5:98206409 |
| 587 | chr12:63541343 |
| 588 | chr2:113060881 |
| 589 | chr1:200822549 |
| 590 | chr12:970297 |
| 591 | chr20:23065992 |
| 592 | chr3:142142409 |
| 593 | chr11:134048586 |
| 594 | chr3:126735391 |
| 595 | chr6:161469776 |
| 596 | chr1:52991780 |
| 597 | chr20:56735727 |
| 598 | chr2:220504282 |
| 599 | chr2:58373509 |
| 600 | chr2:242179467 |
| 601 | chr9:35547974 |
| 602 | chr14:35331423 |
| 603 | chr2:219529514 |
| 604 | chr3:176769342 |
| 605 | chr4:156273869 |
| 606 | chr2:20200211 |
| 607 | chr4:76891521 |
| 608 | chr4:68530907 |
| 609 | chr20:5924808 |
| 610 | chr2:103334978 |
| 611 | chr13:95735432 |
| 612 | chr19:5590343 |
| 613 | chr1:155448996 |
| 614 | chr6:36181729 |
| 615 | chr2:88327536 |
| 616 | chr5:37226878 |
| 617 | chr8:27364393 |
| 618 | chr16:50825519 |
| 619 | chr4:83827648 |
| 620 | chr10:18834895 |
| 621 | chrX:41089035 |
| 622 | chr3:113380090 |
| 623 | chr1:207642044 |
| 624 | chr17:17119709 |
| 625 | chr6:84896233 |
| 626 | chr18:67697249 |
| 627 | chr7:100285170 |
| 628 | chr18:21745097 |
| 629 | chr6:30572795 |
| 630 | chr9:109689491 |
| 631 | chr4:95173910 |
| 632 | chr19:13882968 |
| 633 | chr10:124758127 |
| 634 | chr13:103381996 |
| 635 | chr16:709106 |
| 636 | chr22:41257115 |
| 637 | chr12:40713870 |
| 638 | chr13:23914687 |
| 639 | chr15:44843099 |
| 640 | chr7:29070262 |
| 641 | chr8:124707762 |
| 642 | chr13:114514859 |
| 643 | chr1:35365852 |
| 644 | chr9:35043650 |
| 645 | chr17:46629737 |
| 646 | chr2:227661664 |
| 647 | chr14:89878534 |
| 648 | chr3:168833257 |
| 649 | chr8:6289099 |
| 650 | chr8:105509429 |
| 651 | chr7:120971879 |
| 652 | chr7:2641075 |
| 653 | chr5:140857742 |
| 654 | chr11:34910341 |
| 655 | chr12:4719362 |
| 656 | chr2:132021078 |
| 657 | chr8:70514026 |
| 658 | chr17:25975972 |
| 659 | chr12:124848228 |
| 660 | chr12:124848228 |
| 661 | chr1:228559450 |
| 662 | chr12:110019240 |
| 663 | chr9:90321802 |
| 664 | chr19:42838298 |
| 665 | chr10:64952699 |
| 666 | chr15:59376343 |
| 667 | chr8:144941378 |
| 668 | chr4:38774956 |
| 669 | chr7:22197474 |
| 670 | chr2:71650549 |
| 671 | chr1:91406040 |
| 672 | chr17:44248731 |
| 673 | chr7:44120414 |
| 674 | chr3:141326548 |
| 675 | chr6:116967058 |
| 676 | chr2:220081103 |
| 677 | chr20:17581680 |
| 678 | chr2:128238676 |
| 679 | chr16:28913640 |
| 680 | chr19:17039884 |
| 681 | chr1:153751860 |
| 682 | chr19:50158042 |
| 683 | chr6:99849343 |
| 684 | chr3:42679036 |
| 685 | chr4:39462464 |
| 686 | chr18:54358513 |
| 687 | chr5:61847115 |
| 688 | chr5:76358967 |
| 689 | chr9:35108148 |
| 690 | chr12:20522723 |
| 691 | chr16:71668442 |
| 692 | chr11:88068108 |
| 693 | chr11:88068108 |
| 694 | chr9:84208132 |
| 695 | chr1:100588802 |
| 696 | chr5:38923329 |
| 697 | chr4:38690460 |
| 698 | chr5:131007941 |
| 699 | chr14:75265533 |
| 700 | chr10:62149221 |
| 701 | chr3:169557805 |
| 702 | chr11:35513670 |
| 703 | chr12:113442830 |
| 704 | chr14:95662949 |
| 705 | chr2:219508084 |
| 706 | chr12:117624320 |
| 707 | chr8:72958792 |
| 708 | chr17:38546381 |
| 709 | chr12:75893593 |
| 710 | chr1:170004605 |
| 711 | chr12:122748169 |
| 712 | chr16:88694459 |
| 713 | chr6:4052975 |
| 714 | chr4:128564917 |
| 715 | chr15:69331226 |
| 716 | chr4:76539580 |
| 717 | chr5:13701426 |
| 718 | chr3:89499363 |
| 719 | chr2:170493804 |
| 720 | chr4:170359358 |
| 721 | chr19:12155504 |
| 722 | chr22:31485922 |
| 723 | chr9:140356679 |
| 724 | chr11:380921 |
| 725 | chr17:61781804 |
| 726 | chr17:61781804 |
| 727 | chr17:61781804 |
| 728 | chr18:45567085 |
| 729 | chr15:28525215 |
| 730 | chr19:7976149 |
| 731 | chr19:7976149 |
| 732 | chr3:33602361 |
| 733 | chr11:45955607 |
| 734 | chr4:186515044 |
| 735 | chr2:176995417 |
| 736 | chr7:128852004 |
| 737 | chr16:30409310 |
| 738 | chr14:75514604 |
| 739 | chr10:17363321 |
| 740 | chr9:21007046 |
| 741 | chr5:154173390 |
| 742 | chr8:24167473 |
| 743 | chr11:64572093 |
| 744 | chr3:194147850 |
| 745 | chr4:1980559 |
| 746 | chr8:6302639 |
| 747 | chr13:73337684 |
| 748 | chr14:100594927 |
| 749 | chr18:40857246 |
| 750 | chr10:103826900 |
| 751 | chr14:20846338 |
| 752 | chr5:72199545 |
| 753 | chr12:49374348 |
| 754 | chr16:24942180 |
| 755 | chr14:105174185 |
| 756 | chr2:203831759 |
| 757 | chr1:7998254 |
| 758 | chr12:57860075 |
| 759 | chr19:12384448 |
| 760 | chr11:9735070 |
| 761 | chr2:10059788 |
| 762 | chr17:73491063 |
| 763 | chr9:33464082 |
| 764 | chr16:71483562 |
| 765 | chr17:61497894 |
| 766 | chr18:13681751 |
| 767 | chr4:2698177 |
| 768 | chr12:53452903 |
| 769 | chr3:25647591 |
| 770 | chr8:39068767 |
| 771 | chr22:33255324 |
| 772 | chr7:151845524 |
| 773 | chr9:135277541 |
| 774 | chr7:33014804 |
| 775 | chr2:99976805 |
| 776 | chr12:54971060 |
| 777 | chr4:26417146 |
| 778 | chr19:36210764 |
| 779 | chr10:91203598 |
| 780 | chr7:102760123 |
| 781 | chr5:68492902 |
| 782 | chr14:55818555 |
| 783 | chr1:46494559 |
| 784 | chr14:96761299 |
| 785 | chr3:26751758 |
| 786 | chr9:6012690 |
| 787 | chr8:100990178 |
| 788 | chr11:27362973 |
| 789 | chr6:17788023 |
| 790 | chr3:37367468 |
| 791 | chr17:18181545 |
| 792 | chr6:42832627 |
| 793 | chr2:99977965 |
| 794 | chr11:102713563 |
| 795 | chr4:3133117 |
| 796 | chr1:153362605 |
| 797 | chrX:133378875 |
| 798 | chr14:105614481 |
| 799 | chr17:19641649 |
| 800 | chr17:40134398 |
| 801 | chr9:19063047 |
| 802 | chr19:45996513 |
| 803 | chr2:231931680 |
| 804 | chr8:30703516 |
| 805 | chr10:91163033 |
| 806 | chr1:89732166 |
| 807 | chr20:2816204 |
| 808 | chr1:89206848 |
| 809 | chr16:53348351 |
| 810 | chr9:90582463 |
| 811 | chr3:38949441 |
| 812 | chr19:48789818 |
| 813 | chr7:89929188 |
| 814 | chr3:195487898 |
| 815 | chr15:42738788 |
| 816 | chr9:95221949 |
| 817 | chr12:117615412 |
| 818 | chr17:73814802 |
| 819 | chr1:12052736 |
| 820 | chr11:65653077 |
| 821 | chrX:131762582 |
| 822 | chr12:57921002 |
| 823 | chr20:36627613 |
| 824 | chr11:970195 |
| 825 | chr6:30157254 |
| 826 | chr1:230798959 |
| 827 | chr12:12814274 |
| 828 | chr10:129913974 |
| 829 | chr9:124536637 |
| 830 | chr11:104874011 |
| 831 | chr5:1074698 |
| 832 | chr15:72190580 |
| 833 | chr17:38552642 |
| 834 | chr1:35370731 |
| 835 | chr9:135277388 |
| 836 | chr15:75499804 |
| 837 | chr3:54596940 |
| 838 | chr9:125861042 |
| 839 | chr8:92352747 |
| 840 | chr11:111896977 |
| 841 | chr2:160604680 |
| 842 | chr11:111904183 |
| 843 | chr18:265348 |
| 844 | chr18:45566519 |
| 845 | chr2:225738848 |
| 846 | chr4:129869675 |
| 847 | chr9:139945517 |
| 848 | chr3:121573659 |
| 849 | chr9:35091693 |
| 850 | chr4:122723894 |
| 851 | chr15:57489984 |
| 852 | chr19:50333113 |
| 853 | chr11:6292451 |
| 854 | chr15:49309051 |
| 855 | chr7:140482927 |
| 856 | chr7:126173278 |
| 857 | chr3:182987674 |
| 858 | chr2:190626331 |
| 859 | chr8:145150876 |
| 860 | chr2:16082314 |
| 861 | chr8:113241029 |
| 862 | chr12:7310658 |
| 863 | chr9:98209617 |
| 864 | chr17:46135788 |
| 865 | chr14:74967607 |
| 866 | chr17:7496122 |
| 867 | chr16:1270496 |
| 868 | chr3:169802469 |
| 869 | chr7:47955186 |
| 870 | chr6:34839369 |
| 871 | chr12:72038781 |
| 872 | chr7:86978480 |
| 873 | chr7:86978480 |
| 874 | chr13:60582734 |
| 875 | chr6:90415853 |
| 876 | chr6:111498763 |
| 877 | chr5:125939712 |
| 878 | chr22:32794006 |
| 879 | chr19:38102620 |
| 880 | chr20:47989891 |
| 881 | chr7:100028068 |
| 882 | chr1:53543377 |
| 883 | chr3:150289746 |
| 884 | chr17:54921519 |
| 885 | chr5:137803132 |
| 886 | chr11:69063724 |
| 887 | chr2:42488302 |
| 888 | chr12:122018740 |
| 889 | chr14:104642560 |
| 890 | chr15:23890894 |
| 891 | chr17:56448298 |
| 892 | chr16:15131931 |
| 893 | chr2:43452512 |
| 894 | chr12:7173239 |
| 895 | chr2:149447829 |
| 896 | chr12:80201042 |
| 897 | chr12:80201042 |
| 898 | chr12:104476535 |
| 899 | chr17:4837373 |
| 900 | chr7:107763584 |
| 901 | chr7:139833448 |
| 902 | chr12:77449827 |
| 903 | chr6:112389434 |
| 904 | chr8:90967512 |
| 905 | chr10:27322259 |
| 906 | chr2:55138130 |
| 907 | chr16:74976691 |
| 908 | chr15:49036443 |
| 909 | chr21:34799292 |
| 910 | chrX:63412648 |
| 911 | chr12:19514518 |
| 912 | chr3:160143940 |
| 913 | chr12:131283100 |
| 914 | chr12:131283100 |
| 915 | chr2:220502413 |
| 916 | chr15:55759242 |
| 917 | chr10:91359120 |
| 918 | chr2:236649677 |
| 919 | chr16:31151942 |
| 920 | chr10:135111566 |
| 921 | chr10:96352051 |
| 922 | chr4:87769943 |
| 923 | chr1:215793922 |
| 924 | chr15:53908071 |
| 925 | chr15:34444996 |
| 926 | chr7:104746985 |
| 927 | chr16:11141159 |
| 928 | chr19:5667115 |
| 929 | chrX:53112052 |
| 930 | chr17:28296061 |
| 931 | chr1:35578941 |
| 932 | chr9:114695180 |
| 933 | chr1:214830653 |
| 934 | chr7:25200833 |
| 935 | chr8:86114461 |
| 936 | chr1:231487256 |
| 937 | chr12:99071207 |
| 938 | chrX:99854070 |
| 939 | chr14:54896992 |
| 940 | chr11:65314283 |
| 941 | chr11:75905667 |
| 942 | chrX:21675046 |
| 943 | chr19:16314384 |
| 944 | chr19:16314384 |
| 945 | chr15:101438350 |
| 946 | chr11:400077 |
| 947 | chr19:42383610 |
| 948 | chr19:39663913 |
| 949 | chr1:149895562 |
| 950 | chr5:108290522 |
| 951 | chrX:19560215 |
| 952 | chr18:31319986 |
| 953 | chr16:30041821 |
| 954 | chr5:140953309 |
| 955 | chr2:169997025 |
| 956 | chr22:41195058 |
| 957 | chr22:41195058 |
| 958 | chr19:36357214 |
| 959 | chr12:130184705 |
| 960 | chr8:37728933 |
| 961 | chr2:26534413 |
| 962 | chr1:156884483 |
| 963 | chr11:64032517 |
| 964 | chr19:52888438 |
| 965 | chr14:75230947 |
| 966 | chr2:203848308 |
| 967 | chr8:32453511 |
| 968 | chr7:97933623 |
| 969 | chr2:169948389 |
| 970 | chr1:206821441 |
| 971 | chr16:84213651 |
| 972 | chr7:154782740 |
| 973 | chr4:153244156 |
| 974 | chr3:126142183 |
| 975 | chrX:54497148 |
| 976 | chr11:118770652 |
| 977 | chr18:30349862 |
| 978 | chr12:42706971 |
| 979 | chr2:196801374 |
| 980 | chr8:124368685 |
| 981 | chr13:31480852 |
| 982 | chr6:18122226 |
| 983 | chr3:71821968 |
| 984 | chr4:71844995 |
| 985 | chr2:159077217 |
| 986 | chr19:47969003 |
| 987 | chr22:50277679 |
| 988 | chr12:88566417 |
| 989 | chr8:53062482 |
| 990 | chr10:93247481 |
| 991 | chr5:13766239 |
| 992 | chr9:32633025 |
| 993 | chr11:73021527 |
| 994 | chr1:178412041 |
| 995 | chr16:27509009 |
| 996 | chr15:85634360 |
| 997 | chr16:31373986 |
| 998 | chr19:35435665 |
| 999 | chr6:126176317 |
| 1000 | chr10:32311826 |
| 1001 | chr6:71235776 |
| 1002 | chr4:37447379 |
| 1003 | chr6:45390355 |
| 1004 | chr2:157185029 |
| 1005 | chr14:50930796 |
| 1006 | chr7:91732039 |
| 1007 | chr4:47939172 |
| 1008 | chr10:27329038 |
| 1009 | chr1:229422305 |
| 1010 | chr6:76423416 |
| 1011 | chr1:154932028 |
| 1012 | chr13:108518338 |
| 1013 | chr9:20912931 |
| 1014 | chr8:125080031 |
| 1015 | chr5:14487781 |
| 1016 | chr1:154942911 |
| 1017 | chr3:63981832 |
| 1018 | chr17:4575894 |
| 1019 | chr12:39734129 |
| 1020 | chr12:29450110 |
| 1021 | chr11:66055105 |
| 1022 | chr11:66055105 |
| 1023 | chr11:108044069 |
| 1024 | chr12:6657974 |
| 1025 | chr5:41181560 |
| 1026 | chr19:11577605 |
| 1027 | chr7:44684936 |
| 1028 | chr1:8716109 |
| 1029 | chr13:50065970 |
| 1030 | chr5:180432665 |
| 1031 | chr14:100728644 |
| 1032 | chr8:145727027 |
| 1033 | chr7:105655642 |
| 1034 | chr4:8616156 |
| 1035 | chr2:110926098 |
| 1036 | chr11:82877219 |
| 1037 | chr8:145065718 |
| 1038 | chr1:55081757 |
| 1039 | chr19:14593640 |
| 1040 | chr17:2579802 |
| 1041 | chr2:230661315 |
| 1042 | chr3:40529660 |
| 1043 | chr9:123954450 |
| 1044 | chr9:125141077 |
| 1045 | chr10:115481532 |
| 1046 | chr10:91514406 |
| 1047 | chr8:92406218 |
| 1048 | chr21:37605286 |
| 1049 | chr20:44050026 |
| 1050 | chr8:68128856 |
| 1051 | chr5:132534817 |
| 1052 | chr15:65994675 |
| 1053 | chr22:42610948 |
| 1054 | chr19:17836781 |
| 1055 | chr8:55538813 |
| 1056 | chr1:233388513 |
| 1057 | chr1:38274674 |
| 1058 | chr4:678571 |
| 1059 | chr4:678571 |
| 1060 | chr7:23775341 |
| 1061 | chr20:62193251 |
| 1062 | chr11:1902786 |
| 1063 | chr1:179337955 |
| 1064 | chr1:192779369 |
| 1065 | chr4:74313372 |
| 1066 | chr4:110756541 |
| 1067 | chr8:27634577 |
| 1068 | chr14:24032654 |
| 1069 | chr6:144086414 |
| 1070 | chr19:50098808 |
| 1071 | chr10:105363391 |
| 1072 | chr16:88504852 |
| 1073 | chr2:97637864 |
| 1074 | chr15:63986203 |
| 1075 | chr11:118402960 |
| 1076 | chr2:241808308 |
| 1077 | chr6:29641359 |
| 1078 | chr8:145773375 |
| 1079 | chr11:17794004 |
| 1080 | chr12:57704152 |
| 1081 | chr5:56219767 |
| 1082 | chr19:33703794 |
| 1083 | chr8:26221272 |
| 1084 | chr16:25232875 |
| 1085 | chr7:4830445 |
| 1086 | chr6:86275080 |
| 1087 | chr19:46025663 |

### Example 3: Selection of an Optimal Subset of FSPs for an MSI Vaccine with High “Immunogenic Coverage”

[0304] SEQ ID NOs: 1 to 1087 indicate the amino acid sequence of FSPs and mFSPs that may be included in a CVP of the present invention. This exemplary CFSP comprises 1087 FSPs and mFSPs. If the criterions outlined in Example 1 and 2 are altered the CFSP will include additional or fewer FSPs and, accordingly the CVP will include additional or fewer FSPs and mFSPs. Depending on the way of administering the CVP, e.g. viral vector, naked DNA/RNA, it may not be practical or economical to generate CVPs of such a large number of FSPs and mFSPs. Thus, the present inventors have developed further selection criteria to select from a CFSP generated as outlined in Examples 1 and 2 a suitable number of FSPs or of mFSPs derived from FSPs of the CFSP to be included in the CVP to attain an optimal immunization of the majority of patients afflicted with a particular MSI cancer or optimal prophylaxis in patients likely to develop a MSI cancer. In the following such additional selection criteria which the present inventors used to determine subsets of FSPs and mFSPs to be included in preferred CVPs are described.

[0305] In previous studies in human subjects vaccinated with different viral antigens have shown that an antigenic sequence of about 400 aa contains on average 3 immunogenic epitopes (min 1, max 12) (FIG. 1) (Borthwick, N., et al. (2017) PLoS One 12(4), Swadling, L., et al. (2014) Sci Transl Med 6(261)). Therefore, to obtain a good “immunogenic coverage”, that is here intended as an expected average of 3 immunogenic epitopes, it would be desirable that the FSPs selected for the vaccine were represented in each patient's tumor for a total length of at least 400 aa. Thus, the present inventors have developed an algorithm to select FSPs from the CFSP in a way that the empirically established minimal immunogenic coverage threshold of 400 aa was reached for the maximum number of MSI tumors examined. Whenever feasible, the present inventors aimed at reaching a target immunogenic coverage of 800 aa to compensate for the possibility that a proportion of the FSPs were not translated or presented on tumor cells. These criteria should ensure: (i) a high probability to induce effective immune responses in a large cohort of patients; and (ii) that a large number of cancer cells within a given patient will be targeted by vaccine-induced immunity.

[0306] An additional constrain was imposed in the algorithm to achieve a maximal total length of 6000 aa for all FSPs in the final vaccine set. This length cutoff reflected a preferred total number of vaccine vectors (n=4) given the maximal insert size of about 4.500 nucleotides per vector encoding about ˜1500 aa of continuous joined FSPs and/or mFSPs.

[0307] For each of the 1059 FSMs generating the FSPs in the CVSP collection, a value of 1 or zero was attributed based on the presence or absence of the FSM, respectively, in each of the 320 TCGA MSI tumors (69 MSI-H colorectal cancer, 85 MSI gastric cancer and 166 MSI endometrial cancer). For each tumor type, FSMs with a frequency <5% were assigned a value of zero to favor the inclusion in the vaccine list of those FSMs that are more shared within each tumor group.

[0308] As a first step, the algorithm ranked the 1059 FSMs according to a score that is the product between the total length of all FSPs generated by each FSM and the FSM's observed frequency across the 320 MSI tumors (aa length x number of samples containing the FSM/total samples).

[0309] The first FSM included in the vaccine list was the one with the highest score. Subsequently, the algorithm proceeded in a cyclic manner, by selecting at each round the FSM that enabled the maximal number of tumors to increase their immunogenic coverage. If more than one FSM fulfilled this condition, the FSM with the highest score was chosen. When an FSM was selected, all FSPs encoded by that FSM were added to the vaccine list and the immunogenic coverage of the samples carrying the selected FSM was updated accordingly by adding the total aa length of the corresponding FSPs. Once a sample reached the target immunogenic coverage threshold (in the present case selected to be 800 aa for colorectal and gastric cancer, 400 aa for endometrial cancer), the algorithm discounted it for the selection of subsequent FSMs, while only taking into account those samples that had yet to reach the target coverage.

[0310] The algorithm continued to add FSPs or mFSPs to the vaccine list, i.e. the amino acid sequences forming the CVP, until one of the three following conditions was fulfilled: (i) the total aa length of all selected FSPs encoded by the selected FSMs superseded 6000aa; (ii) all cancer samples had an immunogenic coverage ≥the target threshold or (iii) there were no more FSMs that increased the immunogenic coverage of the samples below the threshold.

[0311] The final subset of FSPs selected with the described algorithm comprises 209 FSPs arising from 204 FSMs for a total length of 6021aa and is referred to as Nous-209 (SEQ ID NO: 1 to 209). This subset of FSPs provides immunogenic coverage ≥400 aa for 98% of TCGA colorectal cancer samples with a median number of 50 FSPs per sample and a median immunogenic coverage of 1322 aa. Similarly, FSPs in Nous-209 confer an immunogenic coverage ≥400 aa in 95% of the gastric cancer samples with a median number of 46 FSPs per sample and a median coverage of 1178 aa. Finally, immunogenic coverage ≥400 aa is reached by 70% of TCGA endometrial cancer, with a median number of 21 FSPs per sample and median coverage of 512 aa. The immunogenic coverage remains very high for colorectal cancer and gastric cancer (93% and 83%, respectively) when calculated for the target value of 800 aa.

### Example 4: Validation of Nous-209 as a Candidate MSI Cancer Vaccine with High Immunogenic Coverage

[0312] As a first validation step for the list of FSPs and mFSPs included in Nous-209, the inventors performed next-generation sequencing (NGS) on a panel of MSI cell lines (7 CRC and 1 EC). At the genomic level (exome-sequencing), the number of FSMs detected in each cell line that were also included in Nous-209 was such that all cell lines overcame significantly the minimal immunogenic coverage threshold of 400 aa, with an average coverage (FSPs cumulative length) of 2037 aa (FIG. 2A).

[0313] Secondly, the inventors analyzed the same cell lines by RNA-seq to determine how many FSMs in Nous-209 that were detected by exome sequencing were also expressed at the transcriptional level. Notably, an immunogenic coverage above 400aa was maintained for all cell lines at the RNA-seq level as well (FIG. 2B).

[0314] Similar results to those obtained for the MSI cell lines were obtained by exome sequencing of six fresh frozen MSI colorectal cancer matched biopsies (tumor and normal tissue). For all patients analyzed, the immunogenic coverage was higher than the minimal threshold of 400 aa, with an average coverage of 926 aa. Four out of six samples exceeded the target threshold of 800 aa (FIG. 3).

[0315] Moreover, to estimate the immunogenicity potential of Nous-209, the inventors calculated how many of the vaccine-encoded FSPs in MSI CRC biopsies were predicted to generate epitopes with a good binding profile (IC₅₀≤500 nM) to MHC-I molecules. To this aim, the inventors first derived the HLA haplotype of the 6 patients from the sequencing data of their biopsies. Subsequently, the inventors performed HLA-I-matched patient-specific binding predictions on the subset of vaccine-encoded FSPs present in each patient using the IEDB software (http://www.iedb.org/). Each MSI patient had on average 67 epitopes (min 29, max 141) predicted to bind their own HLA-I haplotype (FIG. 4).

[0316] Taken together, these results demonstrate that high immunogenic coverage can be achieved through a subset of FSPs, like the subset included in Nous-209 both in MSI cell lines and primary tumor biopsies.

[0317] The inventors then verified whether immunogenic responses against FSPs in Nous-209 could be measured in vivo. To this aim, the inventors immunized HLA-A02⁺ transgenic mice with a subset of Nous-209 FSPs. Vaccine-induced immune responses were evaluated by cytofluorimetry (FACS) using nonamers selected from those FSPs based on binding prediction to HLA-A02. FIG. 5 shows representative CD8 T cell responses to an HLA-A02 nonamer derived from the FSP corresponding to SEQ ID NO: 123 in 5 animals, as measured by intracellular staining (ICS) for interferon γ (IFN-γ) (panel A). FACS plot of gating strategy for IFN-γ±CD8 T cells from one of those mice are depicted in panel B, showing a significant percentage (5.6%) of FSP-reactive T cells.

### Example 5: Construction of Nucleic Acid Cassettes for Nous-209

[0318] The FSPs in Nous-209 were split into 4 subsets to generate artificial genes of a length of about 4500 nucleotides, each encoding about 1500 aa suitable for cloning into the following viral backbones: Great Apes Adenovirus (GAd) and Modified Vaccinia Ankara (MVA). Each gene was assembled by joining the FSP sequences one after the other without any linker. The 209 FSPs were distributed across the 4 genes in a way to ensure that each gene would contain approximately the same number of FSPs with similar rank levels according to the algorithm described in Example 3 and would contain FSPs where the corresponding FSMs have a similar overall distribution of observed frequencies across the three cancer types. This procedure resulted in:

### Gene 1=1507aa (46 FSPs)

### Gene 2=1501aa (54 FSPs)

### Gene 3=1506aa (59 FSPs)

### Gene 4=1507aa (51 FSPs).

[0319] Each artificial gene was assembled in four different layouts (A, B, C and D) corresponding to a different order of the FSPs (Table 2). Genes in layout A and C were used to construct GAd vectors, while genes in layout B and D were cloned in MVA backbones, based on a heterologous prime-boost vaccination strategy. The scrambling of FSPs between layouts A and B and between layouts C and D was designed to avoid having both GAd and MVA encoding the same junctional aa sequences between adjacent FSPs, which could boost immune responses against junctional epitopes. To choose the order of FSPs for each gene in the two layouts, the inventors used a procedure that generates 50,000 different polypeptides where FSPs are joined in random order. Out of these, the inventors selected two with different junctions and with a disordered sequence in the first 50 aa (mean disorder tendency >0.50, as estimated by the IUPRED software (Dosztanyi Z., et al. (2005) Bioinformatics 21, 3433) (FIG. 6). The latter choice was based on the notion that a disordered N-terminus favours processing by the proteasome and, therefore, should increase the chances of presentation of FSP-derived epitopes on MHC-I molecules. Subsequently, the artificial polypeptides were screened in silico for similarity to human reference proteins to avoid generation of regions cross-reactive with the human proteome. The aa sequences of the four poly-FSP strings in layouts A, B, C and D are listed as SEQ ID NO: 1088 to 1091 (layout A), SEQ ID NO: 1092 to 1095 (layout B), SEQ ID NO: 1155 to 1158 (layout C) and SEQ ID NO: 1159 to 1162 (layout D) corresponding to a different order of the FSPs (Table 2). Genes in layout A and C were used to construct GAd vectors, while genes in layout B and D were cloned in MVA backbones, based on a heterologous prime-boost vaccination strategy. The scrambling of FSPs between layouts A and B and between layouts C and D was designed respectively. Their corresponding nt sequences are SEQ ID NO: 1096 to 1099 (layout A), SEQ ID NO: 1100 to 1103 (layout B), SEQ ID NO: 1163 to 1166 (layout C) and SEQ ID NO: 1167 to 1170 (layout D).

[0320] In order to construct an expression cassette, a sorting signal (either the human tissue plasminogen activator signal peptide (hTPA; SEQ ID NO: 1104) or the human invariant chain (hINV; SEQ ID NO: 1105) was added at the N-terminus and an influenza HA-tag sequence (SEQ ID NO: 1106) at the C-terminus of each polypeptide sequence (FIG. 7). The extended sequence of the so constructed polypeptides is provided as SEQ ID NO: 1107 to 1110 (layout A), SEQ ID NO: 1111 to 1114 (layout B), SEQ ID NO: 1171 to 1174 (layout C) and SEQ ID NO: 1179 to 1182 (layout D) for hTPA and by SEQ ID NO: 1115 to 1118 (layout A), SEQ ID NO: 1119 to 1122 (layout B), SEQ ID NO: 1175 to 1178 (layout C) and SEQ ID NO: 1183 to 1186 (layout D) for hINV. The corresponding nt sequences to generate the indicated poly-FSPs strings were codon-optimized based on human codon usage (SEQ ID NO: 1123 to 1126 for layout A, SEQ ID NO: 1127 to 1130 for layout B, SEQ ID NO: 1187 to 1190 for layout C and SEQ ID NO: 1191 to 1194 for layout D with hTPA; SEQ ID NO: 1131 to 1134 for layout A, SEQ ID NO: 1135 to 1138 for layout B, SEQ ID NO: 1195 to 1198 for layout C and SEQ ID NO: 1199 to 1202 for layout D with hINV). In addition, a Kozak sequence (CGCGACTTCGCCGCC) was placed immediately upstream of the start codon to allow for efficient initiation of translation and a TAA stop codon was placed downstream of the HA tag. Finally, two flanking segments comprising unique restriction sites to facilitate the sub-cloning of the cassettes were added at the 5′- and 3′-end of the nucleotide sequence, respectively (FIG. 7). The nt sequences representing the artificial genes (SEQ ID NO: 1139 to 1142 for layout A, SEQ ID NO: 1143 to 1146 for layout B, SEQ ID NO: 1203 to 1206 for layout C and SEQ ID NO: 1207 to 1210 for layout D with hTPA; SEQ ID NO: 1147 to 1150 for layout A, SEQ ID NO: 1151 to 1154 for layout B, SEQ ID NO: 1211 to 1214 for layout C and SEQ ID NO: 1215 to 1218 for layout D with hINV) were generated by standard oligonucleotide synthesis methods and sub-cloned between the TetO-CMV promoter (hCMV promoter with binding site for the Tet Repressor) and the BGH (Bovine growth hormone) polyA.

TABLE 2
FSP composition of the assembled polypeptides for Gene1, Gene2, Gene3 and Gene4 in layout
A, B, C and D. In each case the SEQ ID NOs of the FSPs are listed based on their position in
the assembled polypeptide (from the N-terminus to the C terminus).

| 1A | 2A | 3A | 4A | 1B | 2B | 3B | 4B | 1C | 2C | 3C | 4C | 1D | 2D | 3D | 4D |
|---|---|---|---|---|---|---|---|---|---|---|---|---|---|---|---|
| 58 | 183 | 135 | 57 | 58 | 183 | 135 | 57 | 70 | 11 | 126 | 128 | 55 | 183 | 139 | 161 |
| 93 | 103 | 172 | 113 | 18 | 92 | 49 | 177 | 58 | 39 | 49 | 161 | 42 | 100 | 184 | 73 |
| 178 | 92 | 40 | 9 | 51 | 100 | 172 | 113 | 42 | 150 | 184 | 177 | 149 | 11 | 125 | 54 |
| 18 | 106 | 139 | 25 | 174 | 71 | 8 | 78 | 118 | 100 | 8 | 148 | 87 | 199 | 206 | 67 |
| 180 | 100 | 168 | 54 | 127 | 79 | 147 | 148 | 110 | 90 | 135 | 83 | 74 | 150 | 209 | 177 |
| 129 | 3 | 8 | 155 | 141 | 194 | 44 | 33 | 1 | 35 | 125 | 50 | 1 | 187 | 208 | 33 |
| 63 | 199 | 126 | 121 | 55 | 187 | 197 | 21 | 102 | 162 | 152 | 169 | 14 | 47 | 176 | 5 |
| 102 | 86 | 192 | 128 | 14 | 52 | 107 | 161 | 145 | 59 | 36 | 54 | 170 | 159 | 160 | 89 |
| 87 | 195 | 91 | 82 | 118 | 23 | 156 | 17 | 149 | 43 | 197 | 13 | 63 | 117 | 107 | 140 |
| 42 | 47 | 143 | 189 | 102 | 3 | 204 | 165 | 182 | 203 | 160 | 57 | 101 | 167 | 16 | 157 |
| 166 | 154 | 49 | 193 | 1 | 19 | 139 | 181 | 101 | 31 | 32 | 37 | 70 | 116 | 99 | 108 |
| 101 | 7 | 131 | 140 | 10 | 195 | 137 | 45 | 166 | 71 | 95 | 140 | 102 | 35 | 32 | 181 |
| 22 | 15 | 95 | 205 | 62 | 117 | 176 | 193 | 186 | 75 | 68 | 113 | 22 | 124 | 147 | 155 |
| 30 | 123 | 202 | 61 | 22 | 94 | 28 | 54 | 2 | 7 | 53 | 205 | 26 | 109 | 156 | 169 |
| 2 | 194 | 60 | 5 | 170 | 154 | 208 | 157 | 18 | 195 | 192 | 17 | 18 | 75 | 188 | 121 |
| 51 | 115 | 80 | 153 | 74 | 179 | 80 | 136 | 55 | 123 | 12 | 108 | 182 | 142 | 91 | 50 |
| 151 | 138 | 107 | 148 | 166 | 7 | 202 | 37 | 190 | 207 | 107 | 77 | 118 | 207 | 4 | 77 |
| 145 | 117 | 99 | 97 | 145 | 106 | 188 | 155 | 141 | 167 | 209 | 89 | 30 | 115 | 168 | 144 |
| 127 | 159 | 24 | 161 | 66 | 199 | 184 | 89 | 93 | 199 | 28 | 136 | 114 | 162 | 48 | 104 |
| 62 | 116 | 197 | 33 | 93 | 146 | 88 | 29 | 34 | 116 | 84 | 132 | 133 | 203 | 172 | 82 |
| 186 | 150 | 20 | 13 | 186 | 86 | 76 | 25 | 10 | 47 | 98 | 165 | 66 | 195 | 68 | 148 |
| 74 | 167 | 81 | 21 | 114 | 15 | 200 | 50 | 129 | 94 | 139 | 29 | 38 | 71 | 36 | 132 |
| 70 | 79 | 28 | 29 | 110 | 159 | 32 | 173 | 66 | 86 | 176 | 67 | 145 | 130 | 40 | 113 |
| 14 | 179 | 152 | 177 | 42 | 167 | 40 | 205 | 127 | 142 | 196 | 155 | 51 | 7 | 49 | 153 |
| 133 | 109 | 160 | 37 | 46 | 35 | 60 | 69 | 30 | 194 | 44 | 5 | 129 | 31 | 76 | 65 |
| 46 | 27 | 164 | 41 | 87 | 116 | 4 | 67 | 85 | 52 | 131 | 158 | 166 | 59 | 95 | 165 |
| 38 | 43 | 206 | 67 | 34 | 142 | 131 | 153 | 105 | 79 | 201 | 73 | 34 | 123 | 200 | 189 |
| 174 | 35 | 204 | 50 | 178 | 124 | 20 | 120 | 14 | 154 | 204 | 185 | 190 | 92 | 204 | 61 |
| 141 | 52 | 188 | 69 | 30 | 198 | 201 | 108 | 151 | 163 | 206 | 153 | 174 | 79 | 53 | 9 |
| 66 | 142 | 53 | 108 | 38 | 123 | 119 | 158 | 180 | 117 | 156 | 61 | 85 | 86 | 60 | 120 |
| 149 | 162 | 208 | 73 | 2 | 43 | 160 | 97 | 114 | 106 | 16 | 189 | 110 | 163 | 131 | 41 |
| 190 | 163 | 209 | 77 | 129 | 130 | 24 | 128 | 87 | 138 | 168 | 82 | 105 | 90 | 119 | 45 |
| 1 | 94 | 12 | 78 | 105 | 150 | 168 | 41 | 174 | 130 | 164 | 25 | 58 | 52 | 175 | 17 |
| 110 | 203 | 44 | 83 | 133 | 162 | 125 | 73 | 63 | 179 | 64 | 181 | 127 | 103 | 112 | 193 |
| 55 | 75 | 137 | 89 | 182 | 191 | 196 | 144 | 38 | 146 | 208 | 121 | 46 | 179 | 143 | 69 |
| 10 | 11 | 36 | 96 | 85 | 115 | 91 | 82 | 46 | 187 | 72 | 69 | 2 | 198 | 192 | 37 |
| 118 | 59 | 196 | 104 | 180 | 39 | 95 | 83 | 51 | 27 | 99 | 78 | 178 | 111 | 24 | 25 |
| 85 | 23 | 48 | 45 | 70 | 207 | 81 | 132 | 170 | 124 | 188 | 157 | 10 | 43 | 126 | 83 |
| 114 | 124 | 64 | 120 | 26 | 56 | 12 | 189 | 22 | 15 | 20 | 144 | 151 | 27 | 20 | 57 |
| 170 | 56 | 72 | 65 | 149 | 109 | 164 | 104 | 62 | 92 | 147 | 9 | 62 | 194 | 28 | 185 |
| 182 | 198 | 156 | 132 | 63 | 111 | 175 | 13 | 133 | 103 | 112 | 96 | 93 | 19 | 98 | 96 |
| 26 | 191 | 98 | 136 | 151 | 103 | 98 | 77 | 178 | 3 | 60 | 41 | 6 | 146 | 202 | 205 |
| 105 | 19 | 76 | 144 | 101 | 75 | 206 | 9 | 6 | 111 | 137 | 65 | 180 | 15 | 152 | 29 |
| 6 | 130 | 119 | 157 | 190 | 47 | 143 | 185 | 26 | 171 | 4 | 45 | 141 | 134 | 197 | 21 |
| 34 | 187 | 147 | 158 | 6 | 138 | 209 | 121 | 74 | 23 | 48 | 33 | 186 | 23 | 88 | 128 |
| | 146 | 125 | 165 | | 90 | 99 | 169 | | 115 | 80 | 193 | | 154 | 201 | 78 |
| | 71 | 176 | 17 | | 27 | 72 | 65 | | 109 | 172 | 21 | | 39 | 72 | 173 |
| | 90 | 84 | 169 | | 134 | 16 | 96 | | 183 | 202 | 120 | | 56 | 12 | 158 |
| | 207 | 200 | 173 | | 203 | 36 | 5 | | 191 | 76 | 104 | | 106 | 81 | 136 |
| | 171 | 88 | 181 | | 171 | 122 | 61 | | 56 | 122 | 173 | | 171 | 137 | 97 |
| | 111 | 112 | 185 | | 163 | 126 | 140 | | 134 | 40 | 97 | | 138 | 164 | 13 |
| | 134 | 184 | | | 59 | 112 | | | 19 | 200 | | | 191 | 135 | |
| | 39 | 4 | | | 11 | 192 | | | 198 | 175 | | | 94 | 84 | |
| | 31 | 68 | | | 31 | 84 | | | 159 | 88 | | | 3 | 122 | |
| | | 122 | | | | 152 | | | | 91 | | | | 8 | |
| | | 32 | | | | 53 | | | | 119 | | | | 44 | |
| | | 201 | | | | 64 | | | | 143 | | | | 196 | |
| | | 16 | | | | 68 | | | | 24 | | | | 64 | |
| | | 175 | | | | 48 | | | | 81 | | | | 80 | |

### Example 6: Confirmation of Immunogenicity

[0321] The immunogenicity of the 4 GAd vectors (GAd20-209-FSPs) containing the 4 genes in layout A (polypeptide sequence SEQ ID NO: 1107 to 1110, nucleotide sequence SEQ ID NO: 1139 to 1142) and the 4 MVA vectors (MVA-209-FSPs) containing the 4 genes in layout B (polypeptide sequence SEQ ID NO: 1111 to 1114, nucleotide sequence SEQ ID NO: 1143 to 1146) has been evaluated in mice (CB6F1 mouse strain). GAd20-209-FSPs were constructed from GAd20 (SEQ ID NO: 1219) deleted for region E3 and with region E1 substituted by the genes. Mice were immunized by a single intramuscular immunization of GAd20-209-FSPs at doses of 10\hat{ }8 viral particles (vp) for each vector and two weeks later were boosted by MVA-209-FSPs at doses of 10\hat{ }7 plaque forming units (pfu). Induction of T-cell responses against vaccine-encoded FSPs was measured by ELIspot assay using synthetic peptides covering the 209 FSPs sequences. Synthetic peptides were diluted in DMSO and mixed to form 16 pools. Immune responses (number of T cells producing Interferon-gamma (IFN-γ) per million splenocytes) were analyzed 2 weeks post prime and one-week post boost. Data show induction of a T-cell mediated immune response after priming with GAd20-209-FSPs and a powerful boost of the immune response obtained after administration of MVA-209-FSPs (FIG. 8). Responses were directed to multiple FSPs distributed over the vaccine constructs as they were detected against each of the 16 peptides pools (FIG. 9). Importantly, vector co-administration did not affect the immune responses against FSP encoded by a single vector, thus excluding immune interference in presence of the vaccine mixture of FSPs (FIG. 10). Finally, quality of T cell responses was assessed by intracellular staining (ICS) by using two peptide pools (pool1 and pool3) and showing the induction of FSP-specific CD4 and CD8 IFN gamma+ T cells (FIG. 11).

[0322] As explained in Example 4, it was verified whether immunogenic responses against FSPs in Nous-209 could also be measured in vivo. HLA-A02+ transgenic mice were immunized with a subset (30 FSPs) of Nous-209 FSPs or with a DMSO negative control. Vaccine-induced immune responses were evaluated by cytofluorimetry (FACS) using nonamers selected from the 30 FSPs based on binding prediction to HLA-A02. FIG. 11 shows a representative CD8 T cell response in 5 animals to a HLA-A02 nonamer present in FSP SEQ ID NO: 123, as measured by intracellular staining (ICS) for interferon γ (IFN-γ) (panel A). FACS plot of gating strategy for IFN-γ+CD8 T cells from one of those mice are depicted in panel B, showing a significant percentage (5.6%) of FSP-reactive T cells.

[0323] Taken together, these results demonstrate that

i) The constructs are highly immunogenic and induce a CD4 and CD8 immune response. ii) The immune response is directed against 16 different peptides pools and therefore recognizes at least 16 different epitopes (one for each pool). It is shown that, even in inbred mice (mice practically genetically identical), the rule of at least one epitope in 400 aa is confirmed, because having 16 epitopes over 6000 aa of vaccine corresponds, on average, to at least one immunogenic epitope in 375 aa.
iii) There is no apparent interference effect, in particular no suppression between the individual vectors since comparable immune responses against vector 1 encoded antigens were measured, whether vector 1 was used alone or combined with the other three vectors. Similarly, comparable immune responses against vector 2 encoded antigens were measured, whether vector 2 was used alone ore combined with the other three.

1. Method of selecting a collection of frame-shift peptides (CFSP) for producing a universal micro-satellite instability (MSI) cancer vaccine peptide collection (CVP) for prophylaxis or treatment of a patient with a cancer comprising hereditary and sporadic MSI cancer or being at risk of developing such a cancer, comprising the steps of:
(i) selecting a collection of nucleic acids (CFSM) each comprising a frame-shift mutation (FSM) each FSM being present in one or more of at least M cancer samples (CS) each of a different patient, wherein the cancer of the patient comprises cancer cells with an MSI phenotype;
wherein at least 50% of the FSM that are selected fulfill criteria (a), (b), (c) and (d):
(a) the FSM is present in a mononucleotide repeat (MNR) of coding genes with a length equal to or longer than 6 nucleotides;
(b) the FSM corresponds to a deletion of 1 nucleotide;
(c) the number of DNA sequencing reads harboring the FSM is significantly higher in the tumor sample as compared to the matched normal sample (FDR-corrected Fisher test p-value equal to or lower than 0.05);
(d) the FSM is present in the matched normal samples with an allele frequency lower than 25%,
(ii) selecting X different frame-shift peptides (FSPs), wherein each selected FSP is the complete translation product of the protein-encoding segment of a nucleic acid comprising a FSM of the CFSM of at least 4 amino acid length, starting from the codon encoding the first amino acid that is different relative to the translation product of the corresponding wild type (wt) nucleic acid without the FSM,
wherein X is at least 20 and M is at least 5.

2. The method of claim 1 wherein at least 50% of the FSPs that are selected fulfill one or more of the following criteria:
(a) the FSP is encoded by a FSM that is observed with a cancer type specific frequency (CF) observed for a subset of CS of a specific type of cancer that are part of the collection of M different CSs that is at least 5% for at least one of the cancer types present in the CS; and/or
(b) the average mRNA expression level of the gene with the FSM encoding the FSP is in the top 80^{th} percentile of the distribution describing the average mRNA expression values of each protein-encoding gene across the CS; and/or
(c) the FSM generating the FSP is observed in less than 2% in normal tissues in a cohort of subjects without a cancer.

3. The method of claim 1, wherein:
(i) the CS are derived from patients having a MSI tumor; and/or
(ii) M is at least 10; and/or
(iii) X is at least 35.

4. A method of determining the amino acid sequences of peptides comprised in a CVP or of the nucleic acid sequences encoding the peptides comprised in the CVP, comprising the steps of:
(a) selecting at least Y FSPs or at least 8 amino acid long fragments thereof from the CFSP selected according to claim 1;
(b) modifying the amino acid sequence of one or more or of all of those FSPs which fulfill the following criteria: (i) the FSP has a length of between 4 to 9 amino acids, and/or (ii) the FSP contains one or more identical contiguous stretches of 8 or more amino acids present in more than one FSP encoded by the same FSM, and/or (iii) the FSP contains one or more contiguous stretches of 8 or more amino acids also present in wt human proteins,
wherein the amino acid sequence of a FSP according to (i) is modified by adding to the N-terminus of the FSP between 1 to 4 amino acids of the wild type (wt) amino acid sequence present immediately upstream of the FSP and wherein the modified FSP (mFSP) has a length of at least 8 amino acids; the amino acid sequence of a FSP according to (ii) is modified by removing these contiguous stretches from all but the longest FSP with the proviso that FSPs with a length of less than 4 amino acids after removal of the contiguous stretch are excluded from the CVP; and/or the amino acid sequence of a FSP according to (iii) is modified by removing these stretches; modified FSPs with a length of less than 4 amino acids after removal of the contiguous stretch are excluded from the CVP,
wherein the amino acid sequences of the CVP comprises the amino acid sequences of the FSPs or fragments thereof selected in step a) and/or modified in step (b);
and wherein Y is at least 20.

5. The method of claim 4, wherein in step (a) the FSPs of the CVP are successively selected from the CFSP and in each selection step a new FSP is selected from the CFSP that increases the cumulative amount of total FSP amino acid length (CAFSPL) to reach a threshold value (TV) in the maximal number of cancer samples which are below that threshold value and, optionally, if more than one FSP increases the CAFSPL for the maximal number of cancer samples for which the CAFSPL is still below the threshold value the FSP with the highest score is selected.

6. The method of claim 4, wherein
(i) the CAFSPL for each cancer sample is determined by summing up the amino acid length of the FSPs that are already part of the CVP and the new FSP from the CFSP for which the corresponding FSMs are present in the cancer sample; and/or
(ii) wherein the threshold value is defined separately for each subset of samples out of the CS that belong to a particular cancer type; and/or
(iii) wherein the score is defined as the product between the amino acid length of the FSP and the overall frequency with which the FSM generating the FSP is observed in the CS, optionally without counting the FSM in the CS from a cancer type for which CF is below 5%, and/or
(iv) wherein the subset of cancer samples comprises all cancer samples from tumor types where the FSM is present with a CF greater than or equal to 5%; and/or
(v) wherein FSPs generated by a FSM with an overall frequency lower than 5% are excluded from the selection; and/or
(vi) wherein addition of new FSPs and/or modified FSPs proceeds until no further FSP is available whose inclusion in the CVP would increase the CAFSPL of any cancer sample whose CAFSPL is still below a threshold value or the cumulative length of all FSPs present in the CVP has reached a maximal value of V amino acids; and/or
(vii) wherein FSPs originating from the same FSM are treated as one FSP with a combined score calculated as the sum of the scores of the individual FSPs.

7. The method of claim 5, wherein addition of new FSPs proceeds until no further FSP is available whose inclusion in the CVP would increase the CAFSPL of any cancer sample whose CAFSPL is still below TV; and/or
wherein FSPs originating from the same FSM are treated as one FSP with a combined score calculated as the sum of the scores of the individual FSPs.

8. The method of claim 6, wherein:
(a) the TV is at least 400 amino acids; or
(b) the TV is:
(i) at least 400 amino acids for colorectal and gastric cancer; and
(ii) at least 200 amino acids for endometrial cancer.

9. The method of claim 4, wherein:
(i) the CVP comprises at least 4 amino acids of each FSP selected from the CFSP; and/or
(ii) Y is selected in such that the cumulative amino acid length V of all peptides that are part of the CVP is at least 280 amino acids;
(iii) Y is at least 35, and/or
(iv) the CVP comprises FSPs and/or mFSPs selected from the group of FSPs and/or mFSPs according to SEQ ID NO: 1 to 1087.

10. A method of producing a CVP or a collection of nucleic acids encoding the CVP comprising the steps of
(i) obtaining the amino acid or nucleic acid sequence information determined in the method of claim 4; and
(ii) synthesizing the amino acid sequence of the CVP in one or more polypeptides or a collection of nucleic acids with that sequence and optionally inserting the collection of nucleic acids into one or more expression cassettes and/or a collection of expression vectors.

11. A CVP or a collection of nucleic acids encoding the peptides of the CVP producible by the method of claim 10.

12. A CVP comprising or consisting of Y different FSPs and/or mFSPs or fragments thereof with a length of at least 8 amino acids, wherein each FSP or the FSPs which are modified to mFSP is a fragment of or the complete translation product of the protein-encoding segment of a FSM containing nucleic acid starting from the codon encoding the first amino acid that is different relative to the translation of the corresponding wt nucleic acid without the FSM of in either case at least 4 amino acid length and wherein at least 50% of the FSPs or the FSPs which are modified to mFSPs fulfill one or more of the following criteria:
(a) the FSP is encoded by a FSM that is observed with a cancer type specific frequency (CF) observed for a subset of CS of a specific type of cancer that are part of a collection of M different CSs that is at least 5% for at least one of the cancer types present in the CS; and/or
(b) the average mRNA expression level of the gene with the FSM encoding the FSP is in the top 80^{th} percentile of the distribution describing the average mRNA expression values of each protein-encoding gene across the CS; and/or
(c) the FSM generating the FSP is observed in less than 2% in normal tissues in a cohort of subjects without a cancer
wherein the amino acid sequence of one or more or all those FSPs which fulfill the following criteria: (i) the FSP encoded by a nucleic acid comprising a FSM starting from the amino acid encoded by the FC has a length between 4 to 9 amino acids, and/or (ii) the FSP contains one or more identical contiguous stretches of 8 or more amino acids present in more than one FSP encoded by the same FSM and/or (iii) the FSP contains one or more contiguous stretches of 8 or more amino acids also present in wt human proteins,
are modified for a FSP according to (i) by adding to the N-terminus of the FSP between 1 to 4 amino acids of the wild type (wt) amino acid sequence present immediately upstream of the FSP and wherein the modified FSP (mFSP) has a length of at least 8 amino acids;
for a FSP according to (ii) is modified by removing these contiguous stretches from all but the longest FSP with the proviso that FSPs with a length of less than 4 amino acids after removal of the contiguous stretch are excluded from the CVP; and/or for a FSP according to (iii) is modified by removing these stretches; modified FSPs with a length of less than 4 amino acids after removal of the contiguous stretch are excluded from the CVP;
and wherein Y is at least 20 and M is at least 5.

13. The CVP of claim 12, wherein:
(i) the CS are derived from patients having a MSI tumor; and/or
(ii) M is at least 10; and/or
(iii) Y is at least 35; and/or
(iv) the CVP comprises at least 4 amino acids of each FSP; and/or
(v) Y is selected in such that the cumulative amino acid length V of all peptides that are part of the CVP is at least 280 amino acids; and/or
(vi) the FSPs and/or mFSPs of the CVP are selected from the group of FSPs and/or mFSPs according to SEQ ID NO: 1 to 1087.

14. The CVP of claim 12, wherein the FSPs of the CVP have been successively selected from a CFSP and wherein in each selection step a new FSP is selected from the CFSP to increase the CAFSPL to reach a threshold value in the maximal number of cancer samples which are below that threshold value and optionally, if more than one FSP increases the CAFSPL for the maximal number of cancer samples for which the CAFSPL is still below the threshold value, the FSP with the highest score is selected.

15. The CVP of claim 14, wherein:
(i) the CAFSPL for each cancer sample is determined by summing up the amino acid length of the FSPs that are already part of the CVP and the new FSP from the CFSPP for which the corresponding FSMs are present in the cancer sample; and/or
(ii) the threshold value is defined separately for each subset of samples out of the CS that belong to a particular cancer type; and/or
(iii) the score is defined as the product between the amino acid length of the FSP and the overall frequency with which the FSM generating the FSP is observed in the CS; and/or
(iv) addition of new FSPs proceeds until no further FSP is available whose inclusion in the CVP would increase the CAFSPL of any cancer sample whose CAFSPL is still below a threshold value (TV); and/or
(v) wherein FSPs originating from the same FSM are treated as one FSP with a combined score calculated as the sum of the scores of the individual FSPs.

16. The CVP of claim 12,
(i) wherein the CAFSPL for each cancer sample is determined by summing up the amino acid length of the FSPs that are already part of the CVP and the new FSP from the CFSP for the corresponding FSM are present in the cancer sample; and/or
(ii) wherein the threshold value is defined separately for each subset of samples out of the CS that belong to a particular cancer type; and/or
(iii) wherein the score is defined as the product between the amino acid length of the FSP and the overall frequency of the FSM generating the FSP without counting the FSM in cancer samples from a cancer type for which CF is below 5%; and/or
(iv) wherein the subset of cancer samples comprises all cancer samples from tumor types where the FSM is present with a CF greater than or equal to 5%; and/or
(v) wherein FSPs generated by a FSM with an overall frequency lower than 5% are excluded from the selection; and/or
(vi) wherein addition of new FSPs proceeds until no further FSP is available whose inclusion in the CVP would increase the CAFSPL of any cancer sample whose CAFSPL is still below a TV or the cumulative length of all FSPs present in the CVP has reached a maximal value of V amino acids; and/or
(vii) and wherein FSPs originating from the same FSM are treated as one FSP with a combined score calculated as the sum of the scores of the individual FSPs.

17. The CVP of claim 12, wherein the TV is:
(a) the TV is at least 400 amino acids; or
(b) the TV is:
(i) at least 400 amino acids for colorectal and gastric cancer; and
(ii) at least 200 amino acids for endometrial cancer.

18. The CVP of claim 12, wherein the peptides of the CVP are separate or at least two are comprised in one or more polypeptides.

19. The CVP of claim 12, wherein the CVP consists of or comprises the four polypeptides with amino acid sequences according to SEQ ID NO: 1088 to 1091 (layout A), SEQ ID NO: 1092 to 1095 (layout B), SEQ ID NO: 1155 to 1158 (layout C) or SEQ ID NO: 1159 to 1162 (layout D).

20. The CVP of claim 12, wherein one or more peptides of the CVP are linked, to one or more of the following elements that enhance immunogenicity of the CVP: an invariant chain sequence or fragment thereof; a tissue-type plasminogen activator; a PEST sequence; a cyclin destruction box; an ubiquitination signal; a SUMOylation signal; an Interleukin; or a checkpoint protein specific ligand.

21. A collection of nucleic acids encoding the CVP of claim 12.

22. A collection of one or more expression vectors each comprising all or part of the collection of nucleic acids of claim 10, wherein the entirety of the collection of expression vectors comprise all of the collection of nucleic acids of claim 10.

23. The collection of expression vectors of claim 21 wherein at least one of the expression vector comprises one or more elements that enhance immunogenicity of the expression vector.

24. The collection of expression vectors of claim 22, wherein at least one of the expression vector comprises one or more nucleic acids encoding an element that enhances immunogenicity of the CVP: an invariant chain sequence or fragment thereof; a tissue-type plasminogen activator; a PEST sequence; a cyclin destruction box; an ubiquitination signal; a SUMOylation signal; an Interleukin; or a checkpoint protein specific ligand.

25. The collection of expression vectors of claim 22, wherein each expression vector is selected from the group consisting of a plasmid; a cosmid; an RNA; an RNA-formulated with an adjuvant; an RNA formulated in liposomal particles; a self-amplifying RNA (SAM); a SAM formulated with an adjuvant; a SAM formulated in liposomal particles; and a viral vector.

26. A CVP of claim 11, for use in prophylaxis or treatment of a patient with a cancer comprising cancer cells with an MSI phenotype or being at risk of developing such cancer.

27. A collection of nucleic acids of claim 11 for use in prophylaxis or treatment of a patient with a cancer comprising cancer cells with an MSI phenotype or being at risk of developing such cancer, wherein the collection of nucleic acids and/or the expression vector collection is administered in a heterologous prime-boost vaccination scheme.

The application's sequence listing, which the Patent Office published only in electronic form, follows.

SEQUENCE LISTING (1219 sequences)

SEQ ID NO: 1 - protein, 154 aa, Artificial Sequence
  modified Homo sapiens FSP
VGAGTGGGPACVPVAEASTGAWTAEGAAGTRCRASRAPCRQLPASSPTKCEICVKRRRRRKRSSQSRSPVPKKRERMMLPVRARTARSALPQGRAPLEGMLLPRALPSLLSRMPARRESRFWLALQALGLRPPHLPSCHPLPQLLGPPPPHQAP

SEQ ID NO: 2 - protein, 74 aa, Artificial Sequence
  modified Homo sapiens FSP
TKCEICVKNTAILAITLITPQDPHLDPVCHPHRRPGWKGHHRVVFSHHPSGSTKSHWQQRERGGGRREKKGCRE

SEQ ID NO: 3 - protein, 8 aa, Homo sapiens
GGKKRSKF

SEQ ID NO: 4 - protein, 8 aa, Homo sapiens
VHKKRGLF

SEQ ID NO: 5 - protein, 40 aa, Homo sapiens
VPPSPPLALGPRMQLCTQLARFFPITPPVWHILGPQRHTP

SEQ ID NO: 6 - protein, 44 aa, Homo sapiens
QPSLPGPCASLLSTLSQPPPQAPSQVWTAATLRCPAVPAAACPP

SEQ ID NO: 7 - protein, 31 aa, Homo sapiens
RATFLLALWECSLPQARLCLIVSRTLLLVQS

SEQ ID NO: 8 - protein, 21 aa, Homo sapiens
RNSRRATPTSKGSLRRKYLRV

SEQ ID NO: 9 - protein, 8 aa, Homo sapiens
VLKKNRKQ

SEQ ID NO: 10 - protein, 10 aa, Homo sapiens
TAFFLLDIIL

SEQ ID NO: 11 - protein, 12 aa, Homo sapiens
RQINRRKLQRKK

SEQ ID NO: 12 - protein, 32 aa, Homo sapiens
RGPRRKVLMVLWLPANQSLQKSQVFQWVLRTE

SEQ ID NO: 13 - protein, 11 aa, Homo sapiens
CRCRREYRVTM

SEQ ID NO: 14 - protein, 38 aa, Homo sapiens
GEKNDLQLFVMSDTTYKIYWTVILLNPCGNLHLKTTSL

SEQ ID NO: 15 - protein, 25 aa, Homo sapiens
RNKKTKLWFSLINIHHRKNPLLPMR

SEQ ID NO: 16 - protein, 26 aa, Homo sapiens
TTTTSSPRRSPALRARGGTTIGEVTS

SEQ ID NO: 17 - protein, 27 aa, Homo sapiens
NLHLCYYHSQSNRNKSRQMESLGMKLQ

SEQ ID NO: 18 - protein, 11 aa, Homo sapiens
MPSSWSSSGRT

SEQ ID NO: 19 - protein, 10 aa, Homo sapiens
PGTSLQCYLN

SEQ ID NO: 20 - protein, 27 aa, Homo sapiens
KGKNSPCCQKKLRVQNQGHLLMILLHN

SEQ ID NO: 21 - protein, 17 aa, Homo sapiens
NILNSLPSSMEIAVLQE

SEQ ID NO: 22 - protein, 11 aa, Homo sapiens
NMGGNRSICLT

SEQ ID NO: 23 - protein, 17 aa, Homo sapiens
ELSLEPWIPYLHQQKTQ

SEQ ID NO: 24 - protein, 73 aa, Homo sapiens
FLIHLRKVDTHHLQVVTKTVTATTADGQRMRRLKCKACRLRWARPEPAAQAPPKSHFPPHPSGPSRTSSLQLR

SEQ ID NO: 25 - protein, 11 aa, Homo sapiens
EWGGQAHRQRN

SEQ ID NO: 26 - protein, 10 aa, Homo sapiens
IVFFLAPYFP

SEQ ID NO: 27 - protein, 9 aa, Homo sapiens
PKFFLTFSQ

SEQ ID NO: 28 - protein, 77 aa, Homo sapiens
ARQPSRPTGRTPTTRLMAPVGSVMSCSLLTQPSPASACTMPPLLHPQWAPHSAGLSPGACRPACTCISMTTISRATW

SEQ ID NO: 29 - protein, 11 aa, Homo sapiens
TAKKSPTSFCC

SEQ ID NO: 30 - protein, 38 aa, Artificial Sequence
  modified Homo sapiens FSP
RKRKREKRSQKSRQNHLQLKSCRRKISNWSKLRSPWIF

SEQ ID NO: 31 - protein, 18 aa, Homo sapiens
RHPSWPWTRCLRMRPPRS

SEQ ID NO: 32 - protein, 16 aa, Homo sapiens
SNGMEACGTHPTPRLS

SEQ ID NO: 33 - protein, 30 aa, Homo sapiens
RASVSFWTLLPTTGVRTRGSPLRLTLWPPR

SEQ ID NO: 34 - protein, 53 aa, Homo sapiens
ALRSMPKSRNQVLFRRNLTPSQLRTLAPPYMLLPQSLSQSLSRKQIPSQSMLV

SEQ ID NO: 35 - protein, 34 aa, Artificial Sequence
  modified Homo sapiens FSP
LQAHPQVPALAPQAWWPARRGPLTSAPSAQQSLT

SEQ ID NO: 36 - protein, 27 aa, Homo sapiens
CTNLSVPMMLTILIWKRVFILLLSDKK

SEQ ID NO: 37 - protein, 9 aa, Homo sapiens
PLFFHGDLC

SEQ ID NO: 38 - protein, 9 aa, Homo sapiens
VSKKRLPKL

SEQ ID NO: 39 - protein, 11 aa, Homo sapiens
RRKKREDHCGL

SEQ ID NO: 40 - protein, 17 aa, Artificial Sequence
  modified Homo sapiens FSP
CLRVRCGGWLCGWTPRG

SEQ ID NO: 41 - protein, 16 aa, Homo sapiens
RESTLGNFWMKLLQLP

SEQ ID NO: 42 - protein, 10 aa, Homo sapiens
ASSPGHPLGP

SEQ ID NO: 43 - protein, 56 aa, Homo sapiens
QWSSVTSLEWTAQERGCSSWLMKQTWMKSWSLRDPSYRSILEYVSTRVLWMPTSTV

SEQ ID NO: 44 - protein, 31 aa, Homo sapiens
NIRKLIWTKQRSFLSLFPKLRATEQMTNVGC

SEQ ID NO: 45 - protein, 11 aa, Homo sapiens
VVINLKRLQKF

SEQ ID NO: 46 - protein, 39 aa, Homo sapiens
NGIWEVMPRTLEGCISVKDHRTSQNHSKCITECVRTALN

SEQ ID NO: 47 - protein, 13 aa, Homo sapiens
RRKWQIRHVLKNL

SEQ ID NO: 48 - protein, 18 aa, Homo sapiens
HQMKCLTAVDCLQAFWDM

SEQ ID NO: 49 - protein, 11 aa, Homo sapiens
KNKKRRKLRPK

SEQ ID NO: 50 - protein, 28 aa, Homo sapiens
TGMEILLWILLKMEIQIFKICLGEMQLC

SEQ ID NO: 51 - protein, 43 aa, Homo sapiens
QRKVVKNPSQPVPLRNDGITNGNDSTRSCSISLKKSLEKMPLM

SEQ ID NO: 52 - protein, 20 aa, Homo sapiens
REKIINPTISCPFQSPTKRL

SEQ ID NO: 53 - protein, 62 aa, Homo sapiens
REWEKRKQILGGGGKYKEYFLKRILIRKAMTVLAGDKKGLGRFMRCVQSETKAVSLQLPLGR

SEQ ID NO: 54 - protein, 8 aa, Homo sapiens
NAKKMPFQ

SEQ ID NO: 55 - protein, 8 aa, Homo sapiens
ADKKNVRS

SEQ ID NO: 56 - protein, 12 aa, Homo sapiens
QEKKSRKLMSSC

SEQ ID NO: 57 - protein, 8 aa, Homo sapiens
IQKKKQKS

SEQ ID NO: 58 - protein, 43 aa, Homo sapiens
TEIQLTMNDSKHKLESPALKQVSPASPPTQQPQTPQDSRQVLA

SEQ ID NO: 59 - protein, 46 aa, Homo sapiens
HWNSAYLGRTLLVTCILYHRWIVTSMCQSQRWLTSTTSRSSALMWT

SEQ ID NO: 60 - protein, 13 aa, Homo sapiens
RKSGVMKCWDLCP

SEQ ID NO: 61 - protein, 13 aa, Homo sapiens
CQKKVPSASPWGL

SEQ ID NO: 62 - protein, 10 aa, Homo sapiens
RLPCKVTESS

SEQ ID NO: 63 - protein, 15 aa, Homo sapiens
NQQLKWTPHILKSAS

SEQ ID NO: 64 - protein, 22 aa, Homo sapiens
NMEHRLTMDSALSLTKREGPET

SEQ ID NO: 65 - protein, 22 aa, Homo sapiens
PACTSKAWTPRKLVGRAVRRKG

SEQ ID NO: 66 - protein, 12 aa, Homo sapiens
FKKKKPLTFSPS

SEQ ID NO: 67 - protein, 8 aa, Homo sapiens
QRPPLQPV

SEQ ID NO: 68 - protein, 8 aa, Homo sapiens
LKKKYLVQ

SEQ ID NO: 69 - protein, 50 aa, Homo sapiens
TSRILNLQVLKKILRSFMKLYHSLVMCLRLRTKLEKALSALFIWPQHSYK

SEQ ID NO: 70 - protein, 40 aa, Homo sapiens
STRREMPSQATPSPPGPWRAALGKEVKRSQSKLRLRNTSP

SEQ ID NO: 71 - protein, 16 aa, Homo sapiens
NSRKKLLEDMKQNGFT

SEQ ID NO: 72 - protein, 10 aa, Homo sapiens
CKKKLLLKLL

SEQ ID NO: 73 - protein, 11 aa, Homo sapiens
DKKKKSTEKTK

SEQ ID NO: 74 - protein, 32 aa, Homo sapiens
TPLSISRPTSRARQSCCLPGLTHPAHQPLGSM

SEQ ID NO: 75 - protein, 11 aa, Homo sapiens
RYKKRGVIAWR

SEQ ID NO: 76 - protein, 8 aa, Homo sapiens
HLKKTSAK

SEQ ID NO: 77 - protein, 15 aa, Homo sapiens
GQAFGSFSADFSAPQ

SEQ ID NO: 78 - protein, 31 aa, Homo sapiens
GQAFGSLCQLVSADFSAPQVTRLRSLNHLLI

SEQ ID NO: 79 - protein, 19 aa, Homo sapiens
GHREGSESDNLGLLYSFPP

SEQ ID NO: 80 - protein, 8 aa, Homo sapiens
SEKKRKLP

SEQ ID NO: 81 - protein, 62 aa, Homo sapiens
TYMEMHYGHQAPQVAMLPKLLCRQMLPTLSTLQQRHPQGPCPPPVTPLRVQSVLLLGVPQTA

SEQ ID NO: 82 - protein, 62 aa, Homo sapiens
MCSSLALPTGLTSLILPSSDLAVLISSSTSHFLMRSPVLPSSRLTCASPQLPRMWTWSSWLK

SEQ ID NO: 83 - protein, 14 aa, Homo sapiens
WLKNWKRFKLKKKY

SEQ ID NO: 84 - protein, 11 aa, Homo sapiens
RRNLQRNLKVL

SEQ ID NO: 85 - protein, 155 aa, Artificial Sequence
  modified Homo sapiens FSP
YPRLKTFGVPLGSILCLAGSLSTMMIISTTRQECGRRASVPCRPMIGSARPGPWRTSAMPSAMGVALPTSCESGRSPPATGGRMPGSQSIMMSWMPPLAPCAACPCSPAPTLCPAHPARAPTAVPAFTPLSAHPVPVLSGCHLAVRTSMLTLLPM

SEQ ID NO: 86 - protein, 15 aa, Homo sapiens
VLFKADQSESSLSSG

SEQ ID NO: 87 - protein, 13 aa, Homo sapiens
RRSKIEASPIGSI

SEQ ID NO: 88 - protein, 10 aa, Homo sapiens
YLFFLTVCGF

SEQ ID NO: 89 - protein, 19 aa, Homo sapiens
QAPLRLWSWCGTSQTYFGS

SEQ ID NO: 90 - protein, 50 aa, Artificial Sequence
  modified Homo sapiens FSP
GKGLTHPVPLKRTLQNKRNKNIKRVNQKKGNIKRKSILLHLIVLNSPESN

SEQ ID NO: 91 - protein, 13 aa, Homo sapiens
TPPPLILWPQAAP

SEQ ID NO: 92 - protein, 10 aa, Homo sapiens
MSRTPPRRVC

SEQ ID NO: 93 - protein, 8 aa, Homo sapiens
LAKKTLTN

SEQ ID NO: 94 - protein, 32 aa, Homo sapiens
PLENTQIPRTSPLWKITMVLTYPNCVVHVLMF

SEQ ID NO: 95 - protein, 30 aa, Homo sapiens
VSVITMKLWEKHFKGLNWNLVVWILNLKMM

SEQ ID NO: 96 - protein, 23 aa, Homo sapiens
IICIKNMFLQRKGFLNLSHVEKF

SEQ ID NO: 97 - protein, 12 aa, Homo sapiens
LKKKPRDICRIS

SEQ ID NO: 98 - protein, 12 aa, Homo sapiens
RLRIPSLRKYRQ

SEQ ID NO: 99 - protein, 30 aa, Homo sapiens
RGASSSTSRDSRSFFTSAHPSRPCRMRLYQ

SEQ ID NO: 100 - protein, 24 aa, Homo sapiens
NPRRKTWKMRKKYAQKPSQKNHLY

SEQ ID NO: 101 - protein, 11 aa, Homo sapiens
IAKKRIKLRRN

SEQ ID NO: 102 - protein, 10 aa, Homo sapiens
FDKKGFVILS

SEQ ID NO: 103 - protein, 12 aa, Homo sapiens
GSPPLHLCQPLR

SEQ ID NO: 104 - protein, 9 aa, Homo sapiens
ELKKNLLLP

SEQ ID NO: 105 - protein, 77 aa, Homo sapiens
RHPHRSPPTSCPPLLEAFPLPRASLRATVPRHSSVLATGLHLHRQISLPLRGFLLHQPLPGQHLWLSHRLRLRLPRT

SEQ ID NO: 106 - protein, 13 aa, Homo sapiens
AAPPHRLLGPSRW

SEQ ID NO: 107 - protein, 14 aa, Homo sapiens
LPLTFSTLLWDSRH

SEQ ID NO: 108 - protein, 25 aa, Homo sapiens
ITHPFASQPLGQEMPNNTQIRLLKP

SEQ ID NO: 109 - protein, 20 aa, Homo sapiens
RAFIHTPRSPGCSVYANMCW

SEQ ID NO: 110 - protein, 18 aa, Homo sapiens
MTLKALVKTWTQFRNYPR

SEQ ID NO: 111 - protein, 19 aa, Homo sapiens
AFWKPPSQGISSCLMTGCW

SEQ ID NO: 112 - protein, 10 aa, Homo sapiens
FEKKRPEWLS

SEQ ID NO: 113 - protein, 9 aa, Homo sapiens
MAKKSQQPL

SEQ ID NO: 114 - protein, 9 aa, Homo sapiens
EAKKSMKRS

SEQ ID NO: 115 - protein, 125 aa, Homo sapiens
RKRMKTGAIQEKGAIQEKGAMTKRICVVNFEACREMESLSAPEKITLFEAHMARCTSINVLCVRASLIEKLMKEKRKMKRNQVASPQIMQRLFIKGYQNNHFTFHLQNFAFFSSFGNNKYINILT

SEQ ID NO: 116 - protein, 17 aa, Homo sapiens
ASPQIMQRMSAVNFETI

SEQ ID NO: 117 - protein, 35 aa, Homo sapiens
ASPQIMQRTSADRFRMKRRMQNLDNLGVPWPLLPG

SEQ ID NO: 118 - protein, 45 aa, Homo sapiens
GDCPRTMAGPSASLHPASGRASRKTWQRRLRACRAGGPAGWARQA

SEQ ID NO: 119 - protein, 12 aa, Homo sapiens
GEKLKHCFKAWG

SEQ ID NO: 120 - protein, 10 aa, Homo sapiens
MLNQKCLAPF

SEQ ID NO: 121 - protein, 10 aa, Homo sapiens
SLILSFQRVK

SEQ ID NO: 122 - protein, 8 aa, Homo sapiens
GAKKITFL

SEQ ID NO: 123 - protein, 43 aa, Homo sapiens
WWCTRGGGKRKKKMCKVSGGCTACVERCPWKGICWKWPVTVAA

SEQ ID NO: 124 - protein, 16 aa, Homo sapiens
RTLESAGLFPWLHTQC

SEQ ID NO: 125 - protein, 12 aa, Homo sapiens
SQKKDPAGKLKK

SEQ ID NO: 126 - protein, 12 aa, Homo sapiens
PIPPHLRHPLLL

SEQ ID NO: 127 - protein, 30 aa, Homo sapiens
VPMSLACSITVSFVGQISTLVLDVSSISHW

SEQ ID NO: 128 - protein, 8 aa, Homo sapiens
DSKKMTQK

SEQ ID NO: 129 - protein, 64 aa, Homo sapiens
RSLLYSRMCLVQIPTHTWEPDYFVSLPMMFSWATQSFPVGAVFLTRPAIPCCSCTSHSNPWSQS

SEQ ID NO: 130 - protein, 29 aa, Homo sapiens
RRRNSRKQSQVQLAIQVLLVDKHKYFLFG

SEQ ID NO: 131 - protein, 11 aa, Homo sapiens
RLDFHPRSSSG

SEQ ID NO: 132 - protein, 10 aa, Homo sapiens
ILAMTLTLNG

SEQ ID NO: 133 - protein, 10 aa, Homo sapiens
QRPPRSILSL

SEQ ID NO: 134 - protein, 11 aa, Homo sapiens
LEKKATWMRRT

SEQ ID NO: 135 - protein, 44 aa, Homo sapiens
GAAAASCQSPPSPRETTPSSDATRRTRPIAAQSKKTMTAAGLTP

SEQ ID NO: 136 - protein, 28 aa, Homo sapiens
IEALTALFTCRTASISVNISTLMSILEA

SEQ ID NO: 137 - protein, 30 aa, Homo sapiens
AFSGRILHQPEMAAMRLMPKFLNSTNSWWT

SEQ ID NO: 138 - protein, 17 aa, Homo sapiens
ILFHVRNIVYGIQVMLC

SEQ ID NO: 139 - protein, 25 aa, Homo sapiens
QNTRSTNLEKNPSLKKQSQRRGKLS

SEQ ID NO: 140 - protein, 30 aa, Homo sapiens
RPSPCLSWSSRIVAPGHALSCRTRRRWSSK

SEQ ID NO: 141 - protein, 10 aa, Homo sapiens
NKVRQNFKRN

SEQ ID NO: 142 - protein, 13 aa, Homo sapiens
IYPPSTCSLPCRG

SEQ ID NO: 143 - protein, 12 aa, Homo sapiens
VDPPGSVWILPC

SEQ ID NO: 144 - protein, 12 aa, Homo sapiens
IIKKMKKRIMVH

SEQ ID NO: 145 - protein, 9 aa, Homo sapiens
KGKKRRKEI

SEQ ID NO: 146 - protein, 11 aa, Homo sapiens
LANGLWFNLIF

SEQ ID NO: 147 - protein, 8 aa, Homo sapiens
RGPPLHTR

SEQ ID NO: 148 - protein, 170 aa, Artificial Sequence
  modified Homo sapiens FSP
NEGNNHWPRVEMPTGWLLVGYNTRNTAQNPRLQQHLKHWQQCTRARWCQEPCQTLTFFHFFFFFKTVSLCCPGWSKGQPPPPGLKPSSLASQVARTTGVYQHVWLICFVFFVCVETGFCHVAQVGLERLVSLSGITDVNHWAQPKPSPSKGTGMNRPIGLRVGKGVWARL

SEQ ID NO: 149 - protein, 78 aa, Artificial Sequence
  modified Homo sapiens FSP
RRMTRRTMTTTKMMMMRRTKRRRRKRRRMTMMTRRTLLTKKTCLTPRTSAATKALPRQTISQRRPIQTPPGTSLAIWG

SEQ ID NO: 150 - protein, 40 aa, Homo sapiens
RARNRNMKKTMSHLIAHQALKMSGLRLFHPRLLTRKKPGK

SEQ ID NO: 151 - protein, 15 aa, Artificial Sequence
  modified Homo sapiens FSP
RRARPTSCSTCRMWW

SEQ ID NO: 152 - protein, 25 aa, Homo sapiens
QVSVYSGNLLSFSRRGMKSSVRLKN

SEQ ID NO: 153 - protein, 27 aa, Homo sapiens
QVVLRLGNLPPFFRGSEVPFPRPCRTK

SEQ ID NO: 154 - protein, 30 aa, Homo sapiens
WLPMRSLGEPWRAGFQWGESPWQVMASLTG

SEQ ID NO: 155 - protein, 10 aa, Homo sapiens
EEKKNGRISS

SEQ ID NO: 156 - protein, 13 aa, Homo sapiens
TMSLSNILMKFRL

SEQ ID NO: 157 - protein, 16 aa, Homo sapiens
RWIFSNQLTVQMLCLP

SEQ ID NO: 158 - protein, 114 aa, Homo sapiens
LLTPDTRWIFSNQLQTVQMLCLPPLKQGERIIWPLGGFQIPNFFWSLGIGHTGAWWHTGRRRREWGGSTVSRSPLWISSMIYLRGMAFASDSSIRTTRVSWCRRCGAKSAAASS

SEQ ID NO: 159 - protein, 13 aa, Homo sapiens
IPSLNAQWMFLRI

SEQ ID NO: 160 - protein, 20 aa, Homo sapiens
SRRNRRYRKIYGELKMSLQA

SEQ ID NO: 161 - protein, 16 aa, Homo sapiens
NRKTRKAAREKHRKTD

SEQ ID NO: 162 - protein, 13 aa, Homo sapiens
FLPSRFPWGPPPL

SEQ ID NO: 163 - protein, 45 aa, Homo sapiens
NSVIVHKIVLVFLKSLSSYNCERRISGIQKRAIEFAVLKLLNMDL

SEQ ID NO: 164 - protein, 61 aa, Homo sapiens
VAPRCPRSAVDISPGPTSPSLASCASVAIGKLALLGASAPCGAAGAREAGRFAVLGTMVMK

SEQ ID NO: 165 - protein, 27 aa, Homo sapiens
SPLWDCSTTTGTHHGCLWEIPSVTLLA

SEQ ID NO: 166 - protein, 26 aa, Homo sapiens
TLAIRFISAPQPSSSTVTAAPSGQYF

SEQ ID NO: 167 - protein, 46 aa, Homo sapiens
LLLAHMYGFSTYGTQKGECVCLQCLSGSSLFILKQPLDLKISKTFM

SEQ ID NO: 168 - protein, 9 aa, Homo sapiens
SLFFSHCLC

SEQ ID NO: 169 - protein, 9 aa, Homo sapiens
LKKKVNACS

SEQ ID NO: 170 - protein, 12 aa, Homo sapiens
NAKKMEDMIWES

SEQ ID NO: 171 - protein, 27 aa, Artificial Sequence
  modified Homo sapiens FSP
GSCGRACSCGRGCGTPRGDWKRHPPRR

SEQ ID NO: 172 - protein, 14 aa, Homo sapiens
MIRKIQKRRRTANR

SEQ ID NO: 173 - protein, 10 aa, Homo sapiens
TYTPHICRHT

SEQ ID NO: 174 - protein, 10 aa, Homo sapiens
MKKKDSTIFI

SEQ ID NO: 175 - protein, 8 aa, Homo sapiens
LCFFYLLY

SEQ ID NO: 176 - protein, 11 aa, Homo sapiens
LTTLSFVLIEE

SEQ ID NO: 177 - protein, 75 aa, Homo sapiens
NLDLQHQRRRKKKKDKVEIRNRSPKANSTECQGEHSREQNLLNLVQLNPHSPHHRKDEEDHQKRHHHHNQKKMSV

SEQ ID NO: 178 - protein, 55 aa, Homo sapiens
ASRAGQFPVWRRTSRGMSLQWKSGNACTPLRCPSRSPATFLTALNGWHRSGLRAQ

SEQ ID NO: 179 - protein, 68 aa, Homo sapiens
PYPISEGLTMTTGRNINSNSLMTNCLFSPIFLCHHAIMHRKMTSPHFRLFSSKIPHPQVPSVVALCKF

SEQ ID NO: 180 - protein, 24 aa, Homo sapiens
LKLAPLQVTTTLKLILVMLEIVTE

SEQ ID NO: 181 - protein, 42 aa, Homo sapiens
CRVNAVEELHSRRMSVRIVKNWVSCCYVRLSAVGLSTWSALD

SEQ ID NO: 182 - protein, 27 aa, Homo sapiens
RLPLRPQRGPRPLHRWLQQTTGCSQRR

SEQ ID NO: 183 - protein, 14 aa, Homo sapiens
RKMQSLNHPSRLTN

SEQ ID NO: 184 - protein, 19 aa, Homo sapiens
SRKKGHTKNRRKAKRKPQI

SEQ ID NO: 185 - protein, 11 aa, Homo sapiens
NKIICKGHRIT

SEQ ID NO: 186 - protein, 9 aa, Homo sapiens
SSFFYTSDR

SEQ ID NO: 187 - protein, 9 aa, Homo sapiens
QKKGHMIFS

SEQ ID NO: 188 - protein, 66 aa, Homo sapiens
MLQKQCCYNLVIKHPLIFRINLRRQGKTKDGVVQSLGFLNQQIILQKEFFICLLMFIKRWKPAATK

SEQ ID NO: 189 - protein, 146 aa, Artificial Sequence
  modified Homo sapiens FSP
HPRTASITLPTTSLKGSRTSCCPRSHPRLPRTKWPLQCLLHSLGTTGTLVWERGVLQMRSLEAHCPLQTFHLHHCRTQPSSCPPAWILYQGQWSGAVVGLRPVAHHLPRPIQGLHCPQAPHQPALSWGKWPVGMTGPARCCRWPRR

SEQ ID NO: 190 - protein, 78 aa, Homo sapiens
RTRLTLTGTRSSGTRASPSAVCLCCWTCPSRSFPAASPSGLRAPVGAQAPPEVTLRASCASSASKACAGLWPWGAQVR

SEQ ID NO: 191 - protein, 52 aa, Homo sapiens
CHPAWLSPISACPRLLPYPFHVLALEVTFPPGTAMPQMQLQALAMWEKGWDK

SEQ ID NO: 192 - protein, 44 aa, Homo sapiens
MDLDGMLTVIGQGLVGMTPRDLGTVAGATAQIQRPIQVQTGGRL

SEQ ID NO: 193 - protein, 33 aa, Homo sapiens
SQKSQHHCALRKIEWATKLSLGGKAGPQAQEKA

SEQ ID NO: 194 - protein, 29 aa, Homo sapiens
IRMCALSHPSFYISSTVCFLSKHCMTACT

SEQ ID NO: 195 - protein, 13 aa, Homo sapiens
RCSLMEQIPHLKS

SEQ ID NO: 196 - protein, 19 aa, Homo sapiens
LLKKSSQLRRSWRNVSRIS

SEQ ID NO: 197 - protein, 19 aa, Homo sapiens
SIPHVPKATAAHSVTVKLQ

SEQ ID NO: 198 - protein, 11 aa, Homo sapiens
THPCTMLLPQG

SEQ ID NO: 199 - protein, 16 aa, Homo sapiens
SRSHLDFSPYWMKKVK

SEQ ID NO: 200 - protein, 9 aa, Homo sapiens
WLKKSTKSR

SEQ ID NO: 201 - protein, 8 aa, Homo sapiens
DRVFLVKI

SEQ ID NO: 202 - protein, 11 aa, Homo sapiens
NIEITPQRSKA

SEQ ID NO: 203 - protein, 106 aa, Homo sapiens
GALRATAPATAAPQAQTPHWRAATTSSMSSSPRAEPTSSSSWATCWPRCCSSSCYWSLSSWPPAGAAEATNTRTRSRESQRGRMLTWRSSLWLQGTRCFTGVRTSS

SEQ ID NO: 204 - protein, 86 aa, Artificial Sequence
  modified Homo sapiens FSP
QSSPFLARSWNTMQWNNKKMAMTVIAGAHHCQYKLTYTKVWKMNWKKMMIGSQHLLFSPLDSSPLQLLLHPHGKRCNPCCRLTWMS

SEQ ID NO: 205 - protein, 135 aa, Homo sapiens
CRGGPSASDRCCSCSPSGFSAGRGRCPVQGCLRPHRVQLLRRWGPGSPAGQRLSKGFQLLRWWGPGSPAPEPRKGPFPPPDPPWPVTAVTVMAGSVPSAQSVDALESPGPLALEGPSSPRNLLWREMSIFLPGIF

SEQ ID NO: 206 - protein, 87 aa, Artificial Sequence
  modified Homo sapiens FSP
HLNRKLHLTRSCLIDLTMMMSQKLWKNQRKRIPLPSPRQHLLPQYPLHPPPPCLLLLHHRHHLAFLEMACSSQHTHSIKIWISFSHE

SEQ ID NO: 207 - protein, 89 aa, Homo sapiens
LILIQHGGIFTFRFWVEKLSWNICKNLSLYLDKFVQRLLYVYIIETNVFVLNLFHVPVNQIFMMAFYLKYTEKAWVMELEWLIQQQCYQ

SEQ ID NO: 208 - protein, 53 aa, Artificial Sequence
  modified Homo sapiens FSP
GPVYYVCNRMNVSSVLKPFLFTVPIEDMRECTLGRNRMNVSSVLKPCLIPVPI

SEQ ID NO: 209 - protein, 43 aa, Homo sapiens
DLPRMLPISSPLHRPQMPFWTCTFPATTWGTWETPSTWGWRTF

SEQ ID NO: 210 - protein, 58 aa, Homo sapiens
VIAILSSMCQEILNRHHRRKEVRKLKQILFQVEETKSGRFWIKHDLVSCLQSYLVMEA

SEQ ID NO: 211 - protein, 9 aa, Homo sapiens
WLGMALIFG

SEQ ID NO: 212 - protein, 87 aa, Homo sapiens
ANMDAQPMMPTPNIIAELPRCTGRRSGSWGVRPWLGMALIPLPGMRQPLSLQGPSSQPRLQRAVAWHSRSMAPTQTCLAPHPKPHWN

SEQ ID NO: 213 - protein, 53 aa, Homo sapiens
TALKYIFVAVRAICVMKSFLIFRRWKSHSPLQIQLHLSHPITTSCSIPWCHLC

SEQ ID NO: 214 - protein, 61 aa, Artificial Sequence
  modified Homo sapiens FSP
HRPASSTGSAAWTWTGTAPCPCSSAEGWTAWPSRPCPSRTASARCWTWSSRGLKGRSRCRT

SEQ ID NO: 215 - protein, 35 aa, Homo sapiens
NDLQLFVMSDTTYKIYWTVILLNPCGNLHLKTTSL

SEQ ID NO: 216 - protein, 33 aa, Homo sapiens
VSWYSHQKKLTVPHSLLFRHKSRRLRLCYMANW

SEQ ID NO: 217 - protein, 12 aa, Homo sapiens
VNLSSPKASLLR

SEQ ID NO: 218 - protein, 22 aa, Homo sapiens
MNSVNLSSPKARDWTVSELLKN

SEQ ID NO: 219 - protein, 20 aa, Artificial Sequence
  modified Homo sapiens FSP
NPDNGGGSFWQEALLVLWTV

SEQ ID NO: 220 - protein, 17 aa, Homo sapiens
QRKPKRANCVIQRRAKM

SEQ ID NO: 221 - protein, 11 aa, Homo sapiens
MQKKWPITYVA

SEQ ID NO: 222 - protein, 11 aa, Homo sapiens
GGGGSWSSPSG

SEQ ID NO: 223 - protein, 16 aa, Homo sapiens
GKDRYCSNIDKHWLNS

SEQ ID NO: 224 - protein, 8 aa, Homo sapiens
RADPQRHT

SEQ ID NO: 225 - protein, 8 aa, Homo sapiens
RAFFGGLL

SEQ ID NO: 226 - protein, 117 aa, Homo sapiens
TSLWSSMPHGVVTANSWLPFGINWERRTRTMRTSSSPRWTRLPTRWRPSKCTASPHSSSFLPVPTGRSLITTGNARWMVLRNSWRAVARMGQGMMTISRTWKKQRSQTWRKTMIRKL

SEQ ID NO: 227 - protein, 117 aa, Homo sapiens
CRTRPRKAASAQSSRSGGEGGSVLVGMERTASTGETVEMRRWWTLVMEWKSSYRAATPCPAPPRPARVPAHASTSLSSHITLKPVTPQERKTQDVGMAVSMDTISIVTMWGEGGGVG

SEQ ID NO: 228 - protein, 57 aa, Homo sapiens
VARVEVAAGPPMREVAEAAAVVMVVRPVATLSPGEARAPLESVRQIYSEHNYCRLIL

SEQ ID NO: 229 - protein, 38 aa, Homo sapiens
RLPGLTCKVRRTLHQLKLCQRVMILSVVFQILMTCQWP

SEQ ID NO: 230 - protein, 26 aa, Homo sapiens
CLESGTDHILTEILSISCKKMNQMEL

SEQ ID NO: 231 - protein, 27 aa, Homo sapiens
RGGAPLPSWSPPCQSLRQAVTSSRTSG

SEQ ID NO: 232 - protein, 13 aa, Homo sapiens
IASTFYLDGNVSS

SEQ ID NO: 233 - protein, 11 aa, Homo sapiens
ECCSSWLRRIE

SEQ ID NO: 234 - protein, 24 aa, Homo sapiens
MECSKLKLFNLFWTWQREPVMQPQ

SEQ ID NO: 235 - protein, 13 aa, Homo sapiens
LQKKNSRKRKQKG

SEQ ID NO: 236 - protein, 12 aa, Homo sapiens
LVVCLSRRMKRC

SEQ ID NO: 237 - protein, 20 aa, Homo sapiens
VDSSSYHPFKINQNIRFQKF

SEQ ID NO: 238 - protein, 12 aa, Homo sapiens
RKRRRRKRKRAN

SEQ ID NO: 239 - protein, 20 aa, Homo sapiens
PYKFSEYRRAFSWSADITGT

SEQ ID NO: 240 - protein, 10 aa, Homo sapiens
ILFFYMAYLW

SEQ ID NO: 241 - protein, 14 aa, Homo sapiens
NGLPETEKMPQLMP

SEQ ID NO: 242 - protein, 12 aa, Homo sapiens
YYQKTWRVILPD

SEQ ID NO: 243 - protein, 97 aa, Homo sapiens
STWFHVTSGTSLSCALPSVLARWNLPMCSGPGNTSKSWRPTCCEQRGSRSEASCRNQKLKRDISENWNKKQINIILPSWNSAVCGFPCLSPKLSRGL

SEQ ID NO: 244 - protein, 58 aa, Homo sapiens
SAAWRSCIALWCASSVTERTRCAGRWLWYCWPTWLRGTAWQLVPLQCRRAVSATSWAS

SEQ ID NO: 245 - protein, 60 aa, Homo sapiens
AVTRASAPRATAAAGAWRGRRPPTARSSATTRGPPSSTSRAVGRPPCWRGPGSTTHTSRP

SEQ ID NO: 246 - protein, 25 aa, Homo sapiens
TIKISQIQNQSVNKNFHIHLKRTYQ

SEQ ID NO: 247 - protein, 77 aa, Artificial Sequence
  modified Homo sapiens FSP
AETITQLYGKHYASGWMMLMSKTPRTYRMCTVGMPRSVCGWPSCFPGLAGSSQGPTLRSGSHCPQDCRRNVNREKTE

SEQ ID NO: 248 - protein, 63 aa, Homo sapiens
AALQTGPGSCPPSRAASLLFSIRRWSTISCPRPSATSQTPGRGVPPRAPASPGRRPLKKWPTP

SEQ ID NO: 249 - protein, 67 aa, Homo sapiens
ASPLKRDPQQGQFIPSQPPTLPWTLRKQPQGPSCSRGSQRAVRGTSPSQGILGSTGCSLGSRLHSWC

SEQ ID NO: 250 - protein, 58 aa, Homo sapiens
NGKLSPRTAVGAARNIRSSSFRSPHTSPFFGPTSGCLGFTQEPPLPQFPRTCHFMFLF

SEQ ID NO: 251 - protein, 15 aa, Homo sapiens
MKALISQEMFSQALL

SEQ ID NO: 252 - protein, 33 aa, Artificial Sequence
  modified Homo sapiens FSP
DTTFQRAPLKFKLALKRVCRKSVLGSGGQRTSW

SEQ ID NO: 253 - protein, 28 aa, Homo sapiens
SFLVLRFMSQIILSEFWMCCGLVPTSSP

SEQ ID NO: 254 - protein, 39 aa, Homo sapiens
TRGTGWPLAGQQPGSCPSQHQGLPGRLPPPRPLQRVRHT

SEQ ID NO: 255 - protein, 44 aa, Homo sapiens
CRRLVSTLNFSAHLLMWTPCTVTWPICTLSSSKTHSTSMHMQQS

SEQ ID NO: 256 - protein, 25 aa, Homo sapiens
LERFETLKIKSSKNICFLHVSVCPS

SEQ ID NO: 257 - protein, 16 aa, Artificial Sequence
  modified Homo sapiens FSP
TLMMSNGCWGWQQSWE

SEQ ID NO: 258 - protein, 45 aa, Homo sapiens
SLLKRNMKSSWMFAKIFNQFSVTSAWKNSWIQLFGLRSDWLIRAV

SEQ ID NO: 259 - protein, 27 aa, Homo sapiens
AGSTGASRPLRTRRTRSQCRRSWSPAR

SEQ ID NO: 260 - protein, 27 aa, Artificial Sequence
  modified Homo sapiens FSP
HPAARSSSCCPAPMSLSWGTALMTSPR

SEQ ID NO: 261 - protein, 16 aa, Homo sapiens
RSQNHQKSPQALAMPW

SEQ ID NO: 262 - protein, 30 aa, Homo sapiens
RSQNHQKRKVLGTILVHNHIIDYAWVICHL

SEQ ID NO: 263 - protein, 25 aa, Homo sapiens
ISFGYPRWTLKALVYSQNGVLIWLM

SEQ ID NO: 264 - protein, 8 aa, Homo sapiens
KEKKGGSE

SEQ ID NO: 265 - protein, 12 aa, Homo sapiens
ELLHPSQRLLVP

SEQ ID NO: 266 - protein, 17 aa, Homo sapiens
VIFFSKPKRIKNLSLKT

SEQ ID NO: 267 - protein, 26 aa, Homo sapiens
KSARTALNSELDVQNAVHENQKERVF

SEQ ID NO: 268 - protein, 19 aa, Artificial Sequence
  modified Homo sapiens FSP
IILDTAKLLTSPQSLLPIR

SEQ ID NO: 269 - protein, 11 aa, Homo sapiens
RILLGTFLAIP

SEQ ID NO: 270 - protein, 24 aa, Homo sapiens
GCCRLLTEMGKRKRKRRSHWMKAQ

SEQ ID NO: 271 - protein, 11 aa, Homo sapiens
LINPDKKIKMI

SEQ ID NO: 272 - protein, 8 aa, Homo sapiens
NKKKVNKN

SEQ ID NO: 273 - protein, 12 aa, Homo sapiens
FIFFLILWSSRQ

SEQ ID NO: 274 - protein, 12 aa, Homo sapiens
MKKENKIKWKLN

SEQ ID NO: 275 - protein, 13 aa, Homo sapiens
KESPGREKGMEKM

SEQ ID NO: 276 - protein, 18 aa, Homo sapiens
LAFSSLLWPSHLDMSMLQ

SEQ ID NO: 277 - protein, 17 aa, Homo sapiens
KPNKNTQITFSLMSFTL

SEQ ID NO: 278 - protein, 12 aa, Homo sapiens
RFFPSILIKSYI

SEQ ID NO: 279 - protein, 12 aa, Homo sapiens
GSPPGGPRPCWT

SEQ ID NO: 280 - protein, 13 aa, Homo sapiens
SIGYLTGFCSPNA

SEQ ID NO: 281 - protein, 13 aa, Homo sapiens
EEPPSCRPTAHIP

SEQ ID NO: 282 - protein, 13 aa, Homo sapiens
EQKTEWEWKLQIE

SEQ ID NO: 283 - protein, 12 aa, Homo sapiens
KVAFLCEKEQIV

SEQ ID NO: 284 - protein, 8 aa, Homo sapiens
QLKKAVKV

SEQ ID NO: 285 - protein, 12 aa, Homo sapiens
LQRMSSDKRNTG

SEQ ID NO: 286 - protein, 9 aa, Homo sapiens
INKKIQATK

SEQ ID NO: 287 - protein, 93 aa, Homo sapiens
TSSPRTMSWLCCLGQIMASAVEASQPPTWPSMPRRTPVGPVSSPARQEGVRVCSGCVTCGETAPMAAMTTAAAPCSHPQSWPVSLSRWRCASV

SEQ ID NO: 288 - protein, 112 aa, Homo sapiens
VGKPLPRSHTAQNIREHTQERDPLSAVNAGNRLVRSHTSMYIEKCTQEKDRIVAENVENPSARSHASINIGELTQERSPMGAMNVGKLSTRSQTSADIRKFMLGRMPTGMKT

SEQ ID NO: 289 - protein, 59 aa, Artificial Sequence
  modified Homo sapiens FSP
CRASLRTDCLLAVVIQFQISTYQAQLRISLRKKKTKQDILTHIIECLKKMKTSTSLGMI

SEQ ID NO: 290 - protein, 94 aa, Homo sapiens
VAPCPWSWGSLRMLVQPEMRAPYGSVLTHCQRLMTHYCAMLGQLSAEAKLRGRRGGGAAPQPVPASNRVAAAVSQEDAGLVEEPMEDVVEDGPG

SEQ ID NO: 291 - protein, 82 aa, Homo sapiens
NTHLQLTHCFLEIKPYSTKKMKMACGKRSLLQEVKKHELPKKAPSWPDRPLVGLARIQIWILHLLGLRPPSLLSVFQMTFIK

SEQ ID NO: 292 - protein, 88 aa, Homo sapiens
GGFRQWWCTCRMSGPSCLLWRSGRPCASRKLQRQLPQPRRHKGKRSLLNRHLMPWSKQQTLLDGTQKLQRPPHSRKRTLISQRPLHPP

SEQ ID NO: 293 - protein, 62 aa, Homo sapiens
LAGLLCPALHLVKPRVLHQNLDPTSSSFSKWCRPWLEQMLHSCRIQKSDFSNNWNSSTQWGS

SEQ ID NO: 294 - protein, 127 aa, Artificial Sequence
  modified Homo sapiens FSP
NVHRQPVQIIKNMETTVTYRKKQIQSQSSTSILSALRVSPVRNSPCSMCCVIIPPGSSHACVQKVTSSLGIRAQGTRRSSNKPLRGDPGVIVPCLCLEEPRKGLWERSPGHPRGSQSALGTASEGWS

SEQ ID NO: 295 - protein, 16 aa, Artificial Sequence
  modified Homo sapiens FSP
NVHRQPVQQIQSQSST

SEQ ID NO: 296 - protein, 14 aa, Artificial Sequence
  modified Homo sapiens FSP
VHRQPVQIQSQSST

SEQ ID NO: 297 - protein, 30 aa, Homo sapiens
SRPGWKRTQQRPPWRTSRGQAQDTSGHRGS

SEQ ID NO: 298 - protein, 53 aa, Homo sapiens
AAALGLRILPPPLTSPSRSTTAPVGSQCVPSWTARRWSTTASGWRRWTTARPP

SEQ ID NO: 299 - protein, 37 aa, Homo sapiens
LSAIRKMTYFTSWILDSDSTHYIPSCNRKSCYKRMWS

SEQ ID NO: 300 - protein, 54 aa, Homo sapiens
WETLSTWRPSERWSCRSPASLPRMWCWCHQASMPWRATPPLLGATTSPPDASGT

SEQ ID NO: 301 - protein, 42 aa, Artificial Sequence
  modified Homo sapiens FSP
YKGRKERKTSVQGITTVILKRRTSLRRESFMKNFLAVTITGS

SEQ ID NO: 302 - protein, 67 aa, Artificial Sequence
  modified Homo sapiens FSP
RPPMTTWPRMRMTLRWARGSLPGPARARPTTPLLPWRTTCSSRPRVGASRPAPHRPQRSSRRYSRSA

SEQ ID NO: 303 - protein, 71 aa, Artificial Sequence
  modified Homo sapiens FSP
RSTGLTGEQTHWLRPTSGPATMSPWYRGPTPSPLTCRCTTPPASPWLPIPVRPMGARAPAPTCVSSTTTGS

SEQ ID NO: 304 - protein, 40 aa, Artificial Sequence
  modified Homo sapiens FSP
RSLPAGPSSRRRAPPRSGRGSLRKWRPGASRRWRMSTWPS

SEQ ID NO: 305 - protein, 43 aa, Homo sapiens
VSTSWGPTAGAARARTCSPCSPTTPSPASGSTSRRTRPNRVLT

SEQ ID NO: 306 - protein, 45 aa, Artificial Sequence
  modified Homo sapiens FSP
TWPAACWATWTSPGAAVPVALRPSASWSRCTCSSSATMWRSTTPR

SEQ ID NO: 307 - protein, 32 aa, Homo sapiens
RRSRAECGSTRSLTARRETPTATMCAAPRVSP

SEQ ID NO: 308 - protein, 57 aa, Homo sapiens
MVKRKNPKRRKLQELLKRRKLRKNSNLSHMMIRFFWMEMRCMYGSMTQFTLKHLSWD

SEQ ID NO: 309 - protein, 35 aa, Artificial Sequence
  modified Homo sapiens FSP
REPLVLSVGNLIGLPIMPSRCENSSLGGMLEMSMH

SEQ ID NO: 310 - protein, 28 aa, Homo sapiens
LPGGIASRFPASWPRTPAACHPSLRTGT

SEQ ID NO: 311 - protein, 66 aa, Homo sapiens
GMTSTCPSAMTWATSSPCSATERATSAGVWTKMAERCRAPAPSQAPPLRVYPPSLHPWSGPRPGQM

SEQ ID NO: 312 - protein, 38 aa, Homo sapiens
GGRMLLEMMKRLVRKNLKKTMMILKTSLKMSFQKMRKR

SEQ ID NO: 313 - protein, 47 aa, Artificial Sequence
  modified Homo sapiens FSP
SHIWPKGFEAQRAQEHRAQLVCSALLPEGIRCRPGAPAAVSPPRGSQ

SEQ ID NO: 314 - protein, 50 aa, Artificial Sequence
  modified Homo sapiens FSP
QTSHWCPTQPRRVASRVWPSTTTLSCPPRSSTSCSTAATAPSPCTPRAAE

SEQ ID NO: 315 - protein, 22 aa, Homo sapiens
SNCQLVTAVPNWNLFSTVLLHL

SEQ ID NO: 316 - protein, 36 aa, Homo sapiens
NDGGGSRSWHLPSHPMQQTPTTARPSTQTSWPSWPS

SEQ ID NO: 317 - protein, 30 aa, Homo sapiens
LILEKSPINVKKCKGFNHYSFCQKHEQSHT

SEQ ID NO: 318 - protein, 26 aa, Homo sapiens
NPPVKESQVARRKCLKEMARRKKTEE

SEQ ID NO: 319 - protein, 17 aa, Homo sapiens
LAMTDDQRMVKNKQLLM

SEQ ID NO: 320 - protein, 21 aa, Homo sapiens
MLTQTDSAWDLEIAEVLFHIQ

SEQ ID NO: 321 - protein, 34 aa, Homo sapiens
AFRDRNTRILGRVSAPEASHDTVTFRTARKGEKF

SEQ ID NO: 322 - protein, 54 aa, Homo sapiens
GKLFRRSKFEAKPTSGPWQPGRNITTKLIQRPLRSSLGSRKTPPSLPFLGEEEL

SEQ ID NO: 323 - protein, 26 aa, Homo sapiens
SSHMHNTSPCQMMSHLNHVQFVLYKL

SEQ ID NO: 324 - protein, 32 aa, Homo sapiens
CYLAGSKMTSLTSGWNGKRQSCSQLCLLPCTI

SEQ ID NO: 325 - protein, 73 aa, Homo sapiens
RRGTSQRAQSGPLSFVLHFLAKDPHPMFLCTPRAHPLARPQGHLLAHPGPSPTWPGPLPLPQTRLDLSAGPTA

SEQ ID NO: 326 - protein, 24 aa, Homo sapiens
SSIHIVEKQLKLRERPTNKKKRKN

SEQ ID NO: 327 - protein, 25 aa, Homo sapiens
LQKKAPQKRIKLLRMLPALYLMACQ

SEQ ID NO: 328 - protein, 40 aa, Artificial Sequence
  modified Homo sapiens FSP
AAQMSWSLPCPPGGAEERMEAPSVGVARRRRRSKGSSMRC

SEQ ID NO: 329 - protein, 24 aa, Homo sapiens
MTPGPGAGPAACSSCAPALCAAAA

SEQ ID NO: 330 - protein, 34 aa, Homo sapiens
TSRGSSLQASSWKMAALFLTTTSRKSRPCTWSCA

SEQ ID NO: 331 - protein, 10 aa, Homo sapiens
FEFFLQCPAK

SEQ ID NO: 332 - protein, 24 aa, Homo sapiens
LCTICTSYVSPWIIFTEMEYFTEM

SEQ ID NO: 333 - protein, 33 aa, Homo sapiens
CGKSIWWLKELRVLMFLHLWDSMKQVALHQSNR

SEQ ID NO: 334 - protein, 23 aa, Homo sapiens
ASPSPSRNKSELLTSPRPLTLQS

SEQ ID NO: 335 - protein, 15 aa, Homo sapiens
LKDCISTKPISGIVP

SEQ ID NO: 336 - protein, 25 aa, Homo sapiens
VSEDGKVASDTCVTLHWPLGKFRFR

SEQ ID NO: 337 - protein, 35 aa, Homo sapiens
KFCNFILLFSLILSIKHISVFFHIFSAVILTQYRS

SEQ ID NO: 338 - protein, 13 aa, Artificial Sequence
  modified Homo sapiens FSP
GRCYQLPQLQGFL

SEQ ID NO: 339 - protein, 11 aa, Artificial Sequence
  modified Homo sapiens FSP
SKLYGDHFLLL

SEQ ID NO: 340 - protein, 21 aa, Homo sapiens
ARAIATRPGGWNRMGEPRGFC

SEQ ID NO: 341 - protein, 13 aa, Homo sapiens
EELFLLVSLAMFR

SEQ ID NO: 342 - protein, 22 aa, Homo sapiens
IPSRHMFSVTKIMLKETFKRRK

SEQ ID NO: 343 - protein, 22 aa, Homo sapiens
RRKIIPNCFWGKTESPSIFTTC

SEQ ID NO: 344 - protein, 41 aa, Homo sapiens
RTTTTSLKEEEGIILITESRSLALLFQSLMILICAGTKEPF

SEQ ID NO: 345 - protein, 33 aa, Homo sapiens
SSGGGLGLIMLPWSGVEIIICLKRIVKRRKRKN

SEQ ID NO: 346 - protein, 11 aa, Homo sapiens
TTKKSMIEWKI

SEQ ID NO: 347 - protein, 40 aa, Artificial Sequence
  modified Homo sapiens FSP
AGSATKMSTNAARRTGAASRSATTSRVASTVPAMAGPAKT

SEQ ID NO: 348 - protein, 9 aa, Homo sapiens
GSKKTGIMW

SEQ ID NO: 349 - protein, 16 aa, Homo sapiens
REKRQAVNMMCQHTMI

SEQ ID NO: 350 - protein, 27 aa, Homo sapiens
GLSLSYGPVSPIIRRLWNIFVRNQEKI

SEQ ID NO: 351 - protein, 17 aa, Homo sapiens
SSCFQRRKRRIYQHLRY

SEQ ID NO: 352 - protein, 68 aa, Homo sapiens
ALPHHPSPIARASWGLRPPAFLWALRILTPLPLPQPQPPAVATATVAATAAALLGLCPFPHHPIWPEV

SEQ ID NO: 353 - protein, 13 aa, Homo sapiens
SPSLQTQWRLKRS

SEQ ID NO: 354 - protein, 12 aa, Homo sapiens
TLVMVATVKLFL

SEQ ID NO: 355 - protein, 23 aa, Homo sapiens
LVCSALISLTLKGNLFTLLTLLM

SEQ ID NO: 356 - protein, 40 aa, Homo sapiens
VAFHPSQPGPCGRPTPKLPSPMRRQPSWQWAASPSTATTS

SEQ ID NO: 357 - protein, 26 aa, Homo sapiens
LVIPKLIILMEKTLTGCLRALKMNRF

SEQ ID NO: 358 - protein, 14 aa, Homo sapiens
TKSGKKQELTFLLL

SEQ ID NO: 359 - protein, 11 aa, Homo sapiens
ESPPAPSMPRC

SEQ ID NO: 360 - protein, 17 aa, Homo sapiens
RQTLRTLSLRGMVPRTL

SEQ ID NO: 361 - protein, 10 aa, Homo sapiens
TTSQSQLSSE

SEQ ID NO: 362 - protein, 9 aa, Homo sapiens
EMKKTTFIS

SEQ ID NO: 363 - protein, 25 aa, Homo sapiens
RFQMQPLSLMPAHWSICLLRDSMIW

SEQ ID NO: 364 - protein, 13 aa, Homo sapiens
VWKKMKSKTSCVV

SEQ ID NO: 365 - protein, 10 aa, Homo sapiens
SGRNLPTAPC

SEQ ID NO: 366 - protein, 18 aa, Homo sapiens
TWPTQTWTRLPRRSCCSR

SEQ ID NO: 367 - protein, 13 aa, Homo sapiens
HTSTLGKKSILLL

SEQ ID NO: 368 - protein, 26 aa, Homo sapiens
GIYFMLQTPTITRLKLWIQKQKTVQH

SEQ ID NO: 369 - protein, 13 aa, Artificial Sequence
  modified Homo sapiens FSP
LASSYSGIQQRKL

SEQ ID NO: 370 - protein, 31 aa, Homo sapiens
IHHLPGTIPLSSGARMCLLSQAPPAGSGGRR

SEQ ID NO: 371 - protein, 55 aa, Homo sapiens
GSPSRSAACGGRERRDRRPGPSRAHCPANGAGWPCPAVPLGPARTGLLPGEAAPS

SEQ ID NO: 372 - protein, 15 aa, Homo sapiens
CWTSHLMQMTRPWLN

SEQ ID NO: 373 - protein, 12 aa, Homo sapiens
QRKKSLKPSGSL

SEQ ID NO: 374 - protein, 8 aa, Homo sapiens
RTPPGGGR

SEQ ID NO: 375 - protein, 8 aa, Homo sapiens
EEKKKAHL

SEQ ID NO: 376 - protein, 15 aa, Artificial Sequence
  modified Homo sapiens FSP
ATVPTCSPRTLRCLP

SEQ ID NO: 377 - protein, 11 aa, Homo sapiens
IGDREQVKKTM

SEQ ID NO: 378 - protein, 9 aa, Homo sapiens
LSKKEKMTR

SEQ ID NO: 379 - protein, 28 aa, Homo sapiens
LSINNYRFQMKFYFRFTSHGSPFTSANF

SEQ ID NO: 380 - protein, 31 aa, Artificial Sequence
  modified Homo sapiens FSP
APFSPKVWRTARGASLSCQTTPPITLSSTPR

SEQ ID NO: 381 - protein, 8 aa, Homo sapiens
DYKKNTGI

SEQ ID NO: 382 - protein, 10 aa, Homo sapiens
IVALMSSTII

SEQ ID NO: 383 - protein, 12 aa, Homo sapiens
IPFFTGLTRMMR

SEQ ID NO: 384 - protein, 25 aa, Homo sapiens
EGRSSTNARSATVCLTAGTSSKITW

SEQ ID NO: 385 - protein, 14 aa, Artificial Sequence
  modified Homo sapiens FSP
SFIALIGRLMFQAC

SEQ ID NO: 386 - protein, 17 aa, Homo sapiens
NTMKWWELYLVILSHIA

SEQ ID NO: 387 - protein, 13 aa, Homo sapiens
SKPKRIKNLSLKT

SEQ ID NO: 388 - protein, 14 aa, Homo sapiens
SLNQRSYARPSCQP

SEQ ID NO: 389 - protein, 16 aa, Homo sapiens
MSPPFMPSRVLFMSRR

SEQ ID NO: 390 - protein, 26 aa, Artificial Sequence
  modified Homo sapiens FSP
IRVIEVARHKPLLRNLKKKKARILRK

SEQ ID NO: 391 - protein, 13 aa, Homo sapiens
PAGWPQAAPRPSA

SEQ ID NO: 392 - protein, 16 aa, Homo sapiens
MATSSHRFLEDMLPAK

SEQ ID NO: 393 - protein, 9 aa, Homo sapiens
ESPPASLKN

SEQ ID NO: 394 - protein, 12 aa, Homo sapiens
GPPPAPPISLAS

SEQ ID NO: 395 - protein, 10 aa, Homo sapiens
TQKKSYPIKT

SEQ ID NO: 396 - protein, 11 aa, Homo sapiens
NWISKKLNLTM

SEQ ID NO: 397 - protein, 9 aa, Homo sapiens
LYKKNSRRL

SEQ ID NO: 398 - protein, 14 aa, Homo sapiens
SIFLAKESSGRAYV

SEQ ID NO: 399 - protein, 13 aa, Homo sapiens
HQRCAASQQSASF

SEQ ID NO: 400 - protein, 9 aa, Homo sapiens
DLKKRRSAV

SEQ ID NO: 401 - protein, 17 aa, Homo sapiens
QLRLMLPSSARPWGPDG

SEQ ID NO: 402 - protein, 14 aa, Homo sapiens
NYNKEFLHQGQLEN

SEQ ID NO: 403 - protein, 15 aa, Homo sapiens
LQTWKKNHLTQTTLK

SEQ ID NO: 404 - protein, 10 aa, Homo sapiens
HITGGTGLLL

SEQ ID NO: 405 - protein, 10 aa, Homo sapiens
EEGGCASGTW

SEQ ID NO: 406 - protein, 29 aa, Homo sapiens
NQERSPDPSPDLHTGLIKSQRKTNTDVNF

SEQ ID NO: 407 - protein, 12 aa, Homo sapiens
AHQKRKQSCRCS

SEQ ID NO: 408 - protein, 9 aa, Homo sapiens
CHKKTSQLD

SEQ ID NO: 409 - protein, 16 aa, Homo sapiens
REFINLKMIKWTLLKS

SEQ ID NO: 410 - protein, 12 aa, Homo sapiens
IFYTWTNQYLQN

SEQ ID NO: 411 - protein, 13 aa, Homo sapiens
SLSPGPKRTQIWS

SEQ ID NO: 412 - protein, 22 aa, Artificial Sequence
  modified Homo sapiens FSP
NWMTMQTIIKNRTEAMPREHLL

SEQ ID NO: 413 - protein, 11 aa, Homo sapiens
EFFFTIGITWI

SEQ ID NO: 414 - protein, 11 aa, Homo sapiens
FPFFSSLEQCP

SEQ ID NO: 415 - protein, 8 aa, Homo sapiens
LYKKIEKN

SEQ ID NO: 416 - protein, 21 aa, Homo sapiens
HPSSTDGGLCEAPGLPTSSSL

SEQ ID NO: 417 - protein, 12 aa, Homo sapiens
LPLQPYLLPCLL

SEQ ID NO: 418 - protein, 11 aa, Homo sapiens
LIEQNLIGKKN

SEQ ID NO: 419 - protein, 11 aa, Homo sapiens
EHGGPPSSMPL

SEQ ID NO: 420 - protein, 11 aa, Homo sapiens
THWKRNPKAIW

SEQ ID NO: 421 - protein, 13 aa, Homo sapiens
GYTPQMEAGAGQW

SEQ ID NO: 422 - protein, 11 aa, Homo sapiens
LTKKIRNSCLI

SEQ ID NO: 423 - protein, 10 aa, Homo sapiens
QPPRRPSTAN

SEQ ID NO: 424 - protein, 10 aa, Homo sapiens
APKKTLLKCW

SEQ ID NO: 425 - protein, 9 aa, Homo sapiens
DMKKNCGSL

SEQ ID NO: 426 - protein, 9 aa, Homo sapiens
WTTGVPPSS

SEQ ID NO: 427 - protein, 11 aa, Homo sapiens
DSLKMVKNFLS

SEQ ID NO: 428 - protein, 9 aa, Homo sapiens
FLNPRKLGP

SEQ ID NO: 429 - protein, 9 aa, Homo sapiens
KTPPGGYPL

SEQ ID NO: 430 - protein, 14 aa, Homo sapiens
SPCWAWTPGGWAAS

SEQ ID NO: 431 - protein, 8 aa, Homo sapiens
QVPPSILH

SEQ ID NO: 432 - protein, 11 aa, Homo sapiens
VKPTLWEEGTS

SEQ ID NO: 433 - protein, 8 aa, Homo sapiens
YWAPHVTP

SEQ ID NO: 434 - protein, 11 aa, Homo sapiens
LLHFLVMLRII

SEQ ID NO: 435 - protein, 11 aa, Homo sapiens
NTLKNSFLLWP

SEQ ID NO: 436 - protein, 11 aa, Homo sapiens
ERQKIKKKPKR

SEQ ID NO: 437 - protein, 42 aa, Homo sapiens
GRRKRSEGGVKRKKENVCKRRKRNVGEKKRKGFDGRKRKGDG

SEQ ID NO: 438 - protein, 24 aa, Homo sapiens
YMKKNLTPSFAMKYLPPICTLGDQ

SEQ ID NO: 439 - protein, 13 aa, Homo sapiens
YSASGHGVRITKS

SEQ ID NO: 440 - protein, 19 aa, Homo sapiens
EMFVLNPCLPSIMLTSHNM

SEQ ID NO: 441 - protein, 14 aa, Homo sapiens
VPALKKLRSPLWIF

SEQ ID NO: 442 - protein, 55 aa, Homo sapiens
RQPEAATKSCVRSSCGGPSGDEPPPCLQQPDPRALSQAFSRSFPLFPSLAGKSMI

SEQ ID NO: 443 - protein, 48 aa, Homo sapiens
RTPTSPAATKSHSLRVFGWADALLNLVARVPSNLGDLFKSKVNPATML

SEQ ID NO: 444 - protein, 32 aa, Homo sapiens
REPRERLYQDTSLMMIVLTIQNAAFLSNIRMA

SEQ ID NO: 445 - protein, 29 aa, Homo sapiens
SKTQRRYKLSSLKEDLLQRSAFTSQAPLY

SEQ ID NO: 446 - protein, 45 aa, Homo sapiens
PGLRPSQHLLLYITLRVVKWIPALATASAWPAPSAKTVWHPTLLI

SEQ ID NO: 447 - protein, 28 aa, Homo sapiens
CHLASCPQCFHQWGRHHHSHRYQEWYLR

SEQ ID NO: 448 - protein, 11 aa, Homo sapiens
GATPQAAPTTS

SEQ ID NO: 449 - protein, 10 aa, Homo sapiens
VLTKQKVLYK

SEQ ID NO: 450 - protein, 10 aa, Homo sapiens
IKALLTLNSL

SEQ ID NO: 451 - protein, 9 aa, Homo sapiens
GTPPWMPFR

SEQ ID NO: 452 - protein, 49 aa, Homo sapiens
HRPPHSQQPFHSHCPSRSPQPSLRPHPHPLRAQGCNPSLSTTHRWYSWG

SEQ ID NO: 453 - protein, 64 aa, Homo sapiens
NYGHCNSPLAFLTQLLPRPTSNPWWMTRRDPFCGGNLISTKLENFVSGISAGTERRQMNLCFLY

SEQ ID NO: 454 - protein, 51 aa, Homo sapiens
RKHCCKRITLRSSCSLGRDLYLWNPRILKGSGGYTDVIMMDATKCTLKAPT

SEQ ID NO: 455 - protein, 47 aa, Homo sapiens
NSGSQSGTKMKATHSGGLKKKSFTVPKLLFPTQKFNLDLKACSIPED

SEQ ID NO: 456 - protein, 28 aa, Homo sapiens
RDQCFQMMEGKAFLPERKCFPGNQHPLG

SEQ ID NO: 457 - protein, 43 aa, Homo sapiens
AMRRPSSRHAAHRPLCQRFPTLTVSRWMTSLISSLRVERSPSP

SEQ ID NO: 458 - protein, 25 aa, Homo sapiens
CIWQPVMDTVILYRSYCSTRQTSMQ

SEQ ID NO: 459 - protein, 17 aa, Homo sapiens
NSLALCWVPACWVTCLH

SEQ ID NO: 460 - protein, 21 aa, Homo sapiens
LLQPCLKALSVPLWKMPSRAS

SEQ ID NO: 461 - protein, 13 aa, Homo sapiens
NPPLRFNLILMMY

SEQ ID NO: 462 - protein, 19 aa, Homo sapiens
TALGATIPSRPRSAAALRT

SEQ ID NO: 463 - protein, 12 aa, Homo sapiens
DAKKLVLLNWLP

SEQ ID NO: 464 - protein, 14 aa, Homo sapiens
GGRMRNIFTPAGHK

SEQ ID NO: 465 - protein, 10 aa, Homo sapiens
LCRNMKQQIY

SEQ ID NO: 466 - protein, 20 aa, Homo sapiens
GEWAALGPCWKSACRASRSA

SEQ ID NO: 467 - protein, 8 aa, Homo sapiens
CPGGALQW

SEQ ID NO: 468 - protein, 10 aa, Homo sapiens
EAKKRIMWLL

SEQ ID NO: 469 - protein, 13 aa, Homo sapiens
HTSWNFRPLNWRS

SEQ ID NO: 470 - protein, 36 aa, Artificial Sequence
  modified Homo sapiens FSP
VGAQLMLTSTSCSTMSCLSRPGWAALQRLTWVCRRP

SEQ ID NO: 471 - protein, 87 aa, Homo sapiens
RAPPKTAPETAAKFLKEGTERNTAESLQEKLGVTPGSWWMHLRSRFLSANAACECVRRLPCDGNTLPRRTSNFYVDVHEALVFDVCL

SEQ ID NO: 472 - protein, 29 aa, Homo sapiens
QLLSQTPRLPPCLHTEEPSHWTGGPRSPP

SEQ ID NO: 473 - protein, 29 aa, Homo sapiens
IAFHIKSIAAALKRHFTVNMSKVETGLHV

SEQ ID NO: 474 - protein, 31 aa, Homo sapiens
WKKTQADCFFGLLKKIGLPQCGDSFLKRPLT

SEQ ID NO: 475 - protein, 23 aa, Homo sapiens
AVFASSRPTSPASCRRPPSSWWR

SEQ ID NO: 476 - protein, 24 aa, Homo sapiens
TQRRLKNWKEKKCIELNILISWRI

SEQ ID NO: 477 - protein, 38 aa, Homo sapiens
RHNDGKNEKNWPNSMKPSYGSVATAASSGHCILCLVWR

SEQ ID NO: 478 - protein, 46 aa, Homo sapiens
TREKIKQPVAQWVMITKRPKENHQRKRRNVNIKKRLRIPSLRKYRQ

SEQ ID NO: 479 - protein, 50 aa, Homo sapiens
LPTPFCTTLRNFFLSSLILAVLCTNCIFRYTASFLQAFMLPGFLKHTKRK

SEQ ID NO: 480 - protein, 33 aa, Homo sapiens
LPILMMPSKKLILYLFLCCPTLSFWQREQPSRT

SEQ ID NO: 481 - protein, 29 aa, Homo sapiens
LSMIMYSLPLTYSNLHTLTILKKYMLSQN

SEQ ID NO: 482 - protein, 28 aa, Homo sapiens
CTPFCTLSAKHVPLSISGSPALELLGPW

SEQ ID NO: 483 - protein, 11 aa, Homo sapiens
LNQKNIPDLSI

SEQ ID NO: 484 - protein, 15 aa, Homo sapiens
VSPLAPCPPLEVHLH

SEQ ID NO: 485 - protein, 14 aa, Homo sapiens
STGRLTARRMPPCL

SEQ ID NO: 486 - protein, 8 aa, Homo sapiens
RPKKRTVL

SEQ ID NO: 487 - protein, 21 aa, Homo sapiens
VVKVWMRVKYTKEVIMDLTNV

SEQ ID NO: 488 - protein, 13 aa, Homo sapiens
FRFFRMRKWRDQI

SEQ ID NO: 489 - protein, 18 aa, Homo sapiens
HFWNSTKKRLRTMKIKCS

SEQ ID NO: 490 - protein, 13 aa, Homo sapiens
LPVLAPIMSRGRA

SEQ ID NO: 491 - protein, 13 aa, Homo sapiens
MTKKENANMIFKK

SEQ ID NO: 492 - protein, 12 aa, Homo sapiens
ALKKPLRKVRRL

SEQ ID NO: 493 - protein, 10 aa, Homo sapiens
DQFFWKMQLL

SEQ ID NO: 494 - protein, 196 aa, Artificial Sequence
  modified Homo sapiens FSP
APTVLGGPRWLCCTQNVASGNGPLLARPAGKPRAASLSSWKALGPSAASLRPSLRAPGRPVGASRPAQTQGSLPRRLLPPFCGQTWPGSWGSQESFICCADISTALPLGSSRPAPAPRHREHEHGHQARPPRLLFTSLMQLLWTQLTRHSPPTLHTGPHPSLHVAALSLLRMDSTLRQGASLFSLTLGGPGPWKDP

SEQ ID NO: 495 - protein, 120 aa, Artificial Sequence
  modified Homo sapiens FSP
RSVCSYAGSWGTALGRGQSLWRRRKRWLCAQTVRAATILLARRRRRSLDLRKRRRANRRMMMMIQRSLNHLLSSWKTGAWKTLTTCSQRRIIEPSPTTRPSASLSDPSLLPKIPRLLSPR

SEQ ID NO: 496 - protein, 9 aa, Artificial Sequence
  modified Homo sapiens FSP
RSWGTALGR

SEQ ID NO: 497 - protein, 104 aa, Homo sapiens
SGPTRRHSWAPKTSSLTRNPRRSLASPTRGKGSARGCGRSRTTLLSRLPAISPPRKRAVWKSLNQSPKLQRVTVIRRGMQRAAATRKGSWSLMSQPRRRTRKER

SEQ ID NO: 498 - protein, 57 aa, Homo sapiens
HLTTKGEGWVHQWGVTVGAQVATAPSMGTPHPLPHHPSMALTPTALCSWSMAWINLR

SEQ ID NO: 499 - protein, 64 aa, Artificial Sequence
  modified Homo sapiens FSP
TCRAIVTMTSCLYLRTTEGHPVGAIPPHSASYPTYPTHFSTWEPVPSDRPAGALPRCSPLRTEG

SEQ ID NO: 500 - protein, 75 aa, Artificial Sequence
  modified Homo sapiens FSP
RRRKRRDIQENQRTLLKIQNCTYPGSPAWRLVAFLSLVARLWKASDLSVRKRNTYGWKLSMARVIENSASKQKIH

SEQ ID NO: 501 - protein, 60 aa, Homo sapiens
GCFWPCLWNSLLRFCPASCSGCYSWTIPPTGSPFSCTTTRSSMNPTSLTPGRSSRTTSQL

SEQ ID NO: 502 - protein, 52 aa, Homo sapiens
CTTSRGHCTGSPRPCTPFAISCTAHKWNGKTPTWSLPKSTSRWKGPSSCCRR

SEQ ID NO: 503 - protein, 33 aa, Homo sapiens
KQTRRRKLLLLCKKNQILKKKGEKLKHCFKAWG

SEQ ID NO: 504 - protein, 33 aa, Homo sapiens
CPLLLVYIMSTTGWLERAYGRLWRPTAIRQTLY

SEQ ID NO: 505 - protein, 52 aa, Artificial Sequence
  modified Homo sapiens FSP
SLLVPRRLLPYTLPHSAHGSRRTSTCQHPTTTNTSSSSSSQMWCRPRSSCIR

SEQ ID NO: 506 - protein, 45 aa, Homo sapiens
SLPPLMSAVATLCQNTPMVSPLGAPLARNCTQHPSPLWLGTLRDT

SEQ ID NO: 507 - protein, 71 aa, Homo sapiens
QRKIMDTRQGKVHTSTDSSWRAPAGTPKQEPLLKPVSRSWHALCRSSLQKPPPWTDKKPNRPTSALCIEPN

SEQ ID NO: 508 - protein, 41 aa, Homo sapiens
MKLTLAVLPTLRNLHCYPQLCLQGRLAARNANMNLEILLGV

SEQ ID NO: 509 - protein, 27 aa, Homo sapiens
CSIKPPLPRRWTTVLREPWHGMQEIRP

SEQ ID NO: 510 - protein, 15 aa, Homo sapiens
RTGPWTPLLPPSCPW

SEQ ID NO: 511 - protein, 32 aa, Homo sapiens
NMETFQSMSWPILTIFLTSMRTIIPEFCLNEF

SEQ ID NO: 512 - protein, 16 aa, Homo sapiens
LGQIIMKKMRRPVCYK

SEQ ID NO: 513 - protein, 37 aa, Homo sapiens
LPPPSHRAPHSPPPSQHRRAQDQPHSCLCPRRTGCCV

SEQ ID NO: 514 - protein, 22 aa, Homo sapiens
SVSRPEACGIRTSLLVRRMRRQ

SEQ ID NO: 515 - protein, 15 aa, Homo sapiens
LQKKEIAKNVFVQNI

SEQ ID NO: 516 - protein, 11 aa, Homo sapiens
IIKKNPALPKH

SEQ ID NO: 517 - protein, 14 aa, Homo sapiens
GFKMQSRRRKWAGN

SEQ ID NO: 518 - protein, 19 aa, Homo sapiens
SATTTTVILEIIIMDRVIP

SEQ ID NO: 519 - protein, 12 aa, Homo sapiens
AASGAAEAAELL

SEQ ID NO: 520 - protein, 12 aa, Homo sapiens
ITKKRNWLRSWL

SEQ ID NO: 521 - protein, 14 aa, Homo sapiens
RRKNKKQPTFFLWQ

SEQ ID NO: 522 - protein, 16 aa, Homo sapiens
VTIRIQKQKFRILKRI

SEQ ID NO: 523 - protein, 14 aa, Homo sapiens
RKENTVKRPNLPHL

SEQ ID NO: 524 - protein, 9 aa, Homo sapiens
IEKKERKNL

SEQ ID NO: 525 - protein, 10 aa, Homo sapiens
LTLFSLKVWE

SEQ ID NO: 526 - protein, 11 aa, Homo sapiens
ILIVCRKSFYS

SEQ ID NO: 527 - protein, 11 aa, Homo sapiens
LISHLMKWAHP

SEQ ID NO: 528 - protein, 8 aa, Homo sapiens
SLFFSYCF

SEQ ID NO: 529 - protein, 11 aa, Homo sapiens
TLNWKRNLLFG

SEQ ID NO: 530 - protein, 13 aa, Homo sapiens
TLNWKRGPSVVPW

SEQ ID NO: 531 - protein, 48 aa, Homo sapiens
TLNWKREPRLSYLKTMYSSLFWSQFPFLQCCHHHHLHHHYHHVLNKYI

SEQ ID NO: 532 - protein, 226 aa, Artificial Sequence
  modified Homo sapiens FSP
QTQLPKVWDPVFFGAASPPSCTWADWLCGAWACAATCSQPSSSRQHRSALMTFLLASWCVPKVSCQGVRRPWNSLPRSTWHSVLMCHQLCSDTSSIVAGQATHQWPGSCPRCASRPRRERTAAWQLCCRRPSRTTFRSQQPSWQGCCPGSTGACWLSARHLRRPCSGARPVPAGVWPAASASTSTPSRQLHRVRPRACMPCPGSSGSSGACTRCRRSGWLGRLHVA

SEQ ID NO: 533 - protein, 88 aa, Homo sapiens
HHLVPLFIWTPWRKSGSGSGLNAWNGFSNLVRLMGPWHLCMGLKSWISVPCPNLLPAPSALVLLAPATPPFGLIPRLPTGLYCFPSSD

SEQ ID NO: 534 - protein, 66 aa, Homo sapiens
LKRQMGSSLLVSMKNPYHLLGPHSLMVTIKWSSRKRYCILQVSHYMMKKGKRDKLPFLLLINFHSA

SEQ ID NO: 535 - protein, 63 aa, Homo sapiens
IFHSGMLPLEIALTISPFSTVCRESERDYNMDFLTLRHLMWMNMNIMSELKMVTSTGLFQENF

SEQ ID NO: 536 - protein, 115 aa, Homo sapiens
PMFYVGPLMCLLTGVFVISGSHLFCTAPAMSDSSPSVTCCRVQPSWWLSPTAGFWRPWPAPCTLSSSATCCSLMWLLSSHFGSCCISSFTMGLSVKCRYTPGLCLSQPFSSLFSP

SEQ ID NO: 537 - protein, 105 aa, Homo sapiens
GSLLSPPERRCGSRLWRAWRRFPLLMMWRTPMTTRLRTQACRRNSSRPRPAGRAPRSLATRPWPRRTGGCLLWRGRCSHRRGGCPWCPRKPRSWPRSACEPGRSP

SEQ ID NO: 538 - protein, 140 aa, Artificial Sequence
  modified Homo sapiens FSP
SRASWVPPQPCRCSMGQPCPRRCCSSPCRPRARRSPASWETHPWAPSSLGPSQPTPSSGSCLQEGACPRSCRPGEGSHHPCCHPCLALLGVTGRPWAWVPQRLWGSEALASEASRKTVGLCRRPLGSHCWGSPPRTTGFP

SEQ ID NO: 539 - protein, 48 aa, Homo sapiens
AALTSSAISGPGWTPRPPTFLSPWPSPAIPLLTPRMSWCSSLTTWPNS

SEQ ID NO: 540 - protein, 80 aa, Homo sapiens
LCSPPSPQNRSRTNGSVTTSATEAWCRTTLPASQRSSACTRSTLMSCTEASRDPAKMRRRSWQRRRLPSVIPTRTARWPR

SEQ ID NO: 541 - protein, 98 aa, Homo sapiens
LVNLKKLWERKKNQSQLLPHALLEEEVVAVENEVARKMILTGGPGFRRVTFHGTTRISGCSSSGLLCSGVESCFTCCSRDPGEKSLGRTLSITIFQKE

SEQ ID NO: 542 - protein, 102 aa, Artificial Sequence
  modified Homo sapiens FSP
VSGSPPAGSSTQAHASVDSRRERVKAVPALAHLVGWGVLISLWRTNDRRVHINSILTQSCFLDFGVEAFYRKESSDVILAFLEAKDSGSPEVRGSRPAWPTW

SEQ ID NO: 543 - protein, 87 aa, Homo sapiens
YIQVKKLISVKNVENVLVVGIISLFITKAYTLERKCGKNIKQHFINVMFVRKFLKANQVWKCIFERIQVKNHTSVKFAISLLELRKH

SEQ ID NO: 544 - protein, 50 aa, Homo sapiens
QGQARDLRCPLTAPLACLHLPSPPVRSTVCAMDSLRPVRLQKYPQAAAVP

SEQ ID NO: 545 - protein, 93 aa, Artificial Sequence
  modified Homo sapiens FSP
ASLLSRSSMSLVRTWSSKLNRHQSLALPVPQGPSGALWKNLRKPPGVTKGPGKVKVSPLGDSCSPRGQQEPGGPAVWKILFWSARRSLVSPGW

SEQ ID NO: 546 - protein, 45 aa, Homo sapiens
RRWPRPRRSAVSCFRITRGPRAASPETSTRPPVLPASPRTSPWSP

SEQ ID NO: 547 - protein, 60 aa, Homo sapiens
SRSSATLPGRRRRRWLRRRRQPISVAPAGPPRRPNQKPNPPGGARCVIMRPTWPGTSAFT

SEQ ID NO: 548 - protein, 30 aa, Homo sapiens
RESRAMISLGALREDWNQKRSLGQQIPVVI

SEQ ID NO: 549 - protein, 57 aa, Homo sapiens
RSINTEVNIRNINIPQKKTRIKNINISINIRNTKEKRLLMLLIKRVCLQQKELNLMI

SEQ ID NO: 550 - protein, 94 aa, Homo sapiens
ASVPGSGPSTQTPLTFTPALCSLRRLRPSMSSTGRHTPCEHRTQATLACPGARRQLPRNFLGERALGLPSPLRVSKWDDSRPRKTRGSLGLPEL

SEQ ID NO: 551 - protein, 76 aa, Artificial Sequence
  modified Homo sapiens FSP
WSPPQPRPPRDAAGFSVSVRDSREEPGGSSPRGAMLRAGLSSVTIPACNISVNSEMDLGPLTPRTQPWARARGRRK

SEQ ID NO: 552 - protein, 39 aa, Homo sapiens
QPPKALQPPRAPQLPNAPQPPSIPQPPRAPQPLKLLQCL

SEQ ID NO: 553 - protein, 29 aa, Homo sapiens
GLTMSPLWPSCPWTGCRCWKPCAGTGLAP

SEQ ID NO: 554 - protein, 45 aa, Artificial Sequence
  modified Homo sapiens FSP
TLESALEKGFMNLANVGKPAAVSAPLFSCKESAVNVGNLLAKPLI

SEQ ID NO: 555 - protein, 38 aa, Homo sapiens
LLKNSLQRLFVLELGVSLIQMTCRGWHTFWSTWYSWVV

SEQ ID NO: 556 - protein, 16 aa, Homo sapiens
LLKNSNCRACFCCGQS

SEQ ID NO: 557 - protein, 18 aa, Homo sapiens
HLLLSLHPSLPKLPQNPL

SEQ ID NO: 558 - protein, 51 aa, Homo sapiens
REIRCVQAVVILCSELSSVHEVLSSCVALFKGAREHICLRETYRLISTIAI

SEQ ID NO: 559 - protein, 30 aa, Homo sapiens
NVKNPKVILIFLMKKQPSKVRRKEAHGLPL

SEQ ID NO: 560 - protein, 32 aa, Homo sapiens
TRTREVSPRHSTLTASRRSSTASTSWEGWPPG

SEQ ID NO: 561 - protein, 48 aa, Homo sapiens
ICPWKRQPGAVAQRIGSHLVPTATLFLLNQHLGKTVRRTVLEWRLTCW

SEQ ID NO: 562 - protein, 36 aa, Homo sapiens
QTLRPWLWLTAWAASTGACGRRQLGANARCSSGMRC

SEQ ID NO: 563 - protein, 33 aa, Homo sapiens
RRTKPAALSPVMVPRQKYQQRVKRSSADPLPLC

SEQ ID NO: 564 - protein, 17 aa, Homo sapiens
RLVRGRRLRTAENVKNN

SEQ ID NO: 565 - protein, 17 aa, Homo sapiens
LDPMAPHRSPTNKLLPQ

SEQ ID NO: 566 - protein, 25 aa, Homo sapiens
NSKKPPQSKRTNGMKMNMKGPEGRR

SEQ ID NO: 567 - protein, 56 aa, Homo sapiens
LPVNVHLVSHSITLLVSTTTNVGLNLRFVEQRESVKTLQAVSAVNAKEGSLLMPPD

SEQ ID NO: 568 - protein, 24 aa, Homo sapiens
SRGQRSLVSADESTTHLRNARKTK

SEQ ID NO: 569 - protein, 16 aa, Homo sapiens
FVKWLKKEEKEVQLQD

SEQ ID NO: 570 - protein, 33 aa, Homo sapiens
GLQTKRTLRIRKPRVLKPLQFRLASQILPTLSK

SEQ ID NO: 571 - protein, 12 aa, Homo sapiens
QTEIVSGILAYC

SEQ ID NO: 572 - protein, 22 aa, Homo sapiens
VATPGRPWPPSFSAPCCWRLWP

SEQ ID NO: 573 - protein, 33 aa, Homo sapiens
ASSPSLLVGANRSSAMGRTGGGCQWWHHFWVPI

SEQ ID NO: 574 - protein, 11 aa, Homo sapiens
SYALSNKNLLI

SEQ ID NO: 575 - protein, 62 aa, Homo sapiens
MALHGVQLRKSKDLHFLLQGCCLMLKRVWIPMQLIAALMTIWMNIPLEKMWQLTVVLNGSGL

SEQ ID NO: 576 - protein, 18 aa, Homo sapiens
LKPAAPRGPIRAKTASIF

SEQ ID NO: 577 - protein, 12 aa, Homo sapiens
KMLKRTKCFTFG

SEQ ID NO: 578 - protein, 21 aa, Homo sapiens
RERTRINRKELRLYHPDTHHA

SEQ ID NO: 579 - protein, 13 aa, Homo sapiens
RIPPHHPRCLRDA

SEQ ID NO: 580 - protein, 19 aa, Homo sapiens
HHHQCQPWSPTLPRTPLLP

SEQ ID NO: 581 - protein, 21 aa, Homo sapiens
MQKKKSSREIRKRRRMMMMRR

SEQ ID NO: 582 - protein, 13 aa, Homo sapiens
WMRRLEERWENKL

SEQ ID NO: 583 - protein, 8 aa, Homo sapiens
AQKKNRRH

SEQ ID NO: 584 - protein, 20 aa, Homo sapiens
RSERKWSWMTLPGSWSMRRT

SEQ ID NO: 585 - protein, 8 aa, Homo sapiens
SLKKQYPK

SEQ ID NO: 586 - protein, 21 aa, Homo sapiens
KLFLVREVQRGEKQELRRIKQ

SEQ ID NO: 587 - protein, 18 aa, Homo sapiens
LVAISFKTVFKASHAAKT

SEQ ID NO: 588 - protein, 22 aa, Homo sapiens
ELVSTGIMTFHLLSVDIYQEAT

SEQ ID NO: 589 - protein, 18 aa, Homo sapiens
NSDQNLFTEIILNPPKHQ

SEQ ID NO: 590 - protein, 10 aa, Homo sapiens
SRKRAVSNSR

SEQ ID NO: 591 - protein, 18 aa, Homo sapiens
MAPSSAAADQDSGCWMTW

SEQ ID NO: 592 - protein, 18 aa, Homo sapiens
HNGYVLQKKLHFTFYTCL

SEQ ID NO: 593 - protein, 13 aa, Homo sapiens
QPPPRSEVLSCPL

SEQ ID NO: 594 - protein, 13 aa, Artificial Sequence
  modified Homo sapiens FSP
RALAALPSSSTLR

SEQ ID NO: 595 - protein, 11 aa, Homo sapiens
DHKKMYSAHSC

SEQ ID NO: 596 - protein, 11 aa, Homo sapiens
SSKKISKMIFV

SEQ ID NO: 597 - protein, 18 aa, Homo sapiens
QSHRPPRASSAGDLQCQA

SEQ ID NO: 598 - protein, 23 aa, Homo sapiens
SVGCLGCPGSRLPRSAPSPMSMR

SEQ ID NO: 599 - protein, 20 aa, Homo sapiens
STVREALSPVQHGKCRKRRN

SEQ ID NO: 600 - protein, 26 aa, Homo sapiens
AAKFARCATALEHVSSSLRLRTRTRT

SEQ ID NO: 601 - protein, 30 aa, Homo sapiens
TSALDVSAPAAMIAACSAALLSAWARWNVC

SEQ ID NO: 602 - protein, 11 aa, Homo sapiens
QDRIFRVFQNH

SEQ ID NO: 603 - protein, 20 aa, Homo sapiens
ETDTSSAFSSLLPLRNLSQL

SEQ ID NO: 604 - protein, 15 aa, Homo sapiens
MEKTQQMGRRMEHIL

SEQ ID NO: 605 - protein, 12 aa, Homo sapiens
RKLFSSKRKKKK

SEQ ID NO: 606 - protein, 13 aa, Homo sapiens
ADKKHVQSVTSVP

SEQ ID NO: 607 - protein, 14 aa, Homo sapiens
RRKNQRCLTFQPFT

SEQ ID NO: 608 - protein, 11 aa, Homo sapiens
KTVFLNHWRGS

SEQ ID NO: 609 - protein, 12 aa, Homo sapiens
KKKKNMKPSLLL

SEQ ID NO: 610 - protein, 9 aa, Homo sapiens
CGPPAWALC

SEQ ID NO: 611 - protein, 10 aa, Homo sapiens
RRYFWKRQEM

SEQ ID NO: 612 - protein, 11 aa, Homo sapiens
DGWGATAPTRG

SEQ ID NO: 613 - protein, 10 aa, Homo sapiens
RGGILLSMFL

SEQ ID NO: 614 - protein, 9 aa, Homo sapiens
QESPRSPLL

SEQ ID NO: 615 - protein, 10 aa, Homo sapiens
KRKKAARKLT

SEQ ID NO: 616 - protein, 9 aa, Homo sapiens
THFFTFFNL

SEQ ID NO: 617 - protein, 11 aa, Homo sapiens
EVVFWMTSGLI

SEQ ID NO: 618 - protein, 12 aa, Homo sapiens
MRKLAFPQFSSC

SEQ ID NO: 619 - protein, 8 aa, Homo sapiens
VSKKDLSP

SEQ ID NO: 620 - protein, 9 aa, Homo sapiens
SIGFLLQNL

SEQ ID NO: 621 - protein, 10 aa, Homo sapiens
EVKKPPVCSR

SEQ ID NO: 622 - protein, 21 aa, Homo sapiens
LLFIPTGISLVETAREQLFRG

SEQ ID NO: 623 - protein, 13 aa, Homo sapiens
AVPPHVKRHAVNL

SEQ ID NO: 624 - protein, 38 aa, Homo sapiens
TCSPQSLLSSWRSTQPHVPPSTLWGVRMTSLSASTSLW

SEQ ID NO: 625 - protein, 11 aa, Homo sapiens
VNLFLTKMMRM

SEQ ID NO: 626 - protein, 12 aa, Homo sapiens
ALKKRRMVLLKS

SEQ ID NO: 627 - protein, 233 aa, Homo sapiens
WLAPPEAGAARGAEAAAVVTAAFTKEASKKAMGPLDEAPGKSSAARAGMTEARGGLRSQQGGMEHDVALRREGLAQGRSTPAQTARTGAPYGRNRRRRRRAAGGSEQGPGETATAGAPPALMVVPALLAGGNMGNGGASLNLICEGIEEGVVKRRGGEGEAALTCGGAERLKALRRTRMGSQSGAWTMRMKKWAPLMPLGPSCLSRRAPRSPFLRSRSWTSKGWRRRRNLPKG

SEQ ID NO: 628 - protein, 70 aa, Homo sapiens
NDLRKNKEQPAKTGPSQKRTGRRGGSIKVLIPTMEHRTGFTLAATGTEITSICLTFIKMHTSQGVWLIYK

SEQ ID NO: 629 - protein, 78 aa, Homo sapiens
YCHLRLPSQAPLKGKRAQNQAQPNLLPQNQHHLLRQWTQTVQAPRFPLLKSRSSWIQPLWSQELWMPSQWRVLEILTN

SEQ ID NO: 630 - protein, 38 aa, Homo sapiens
HNPRHQTSVLSFTTANTVPTAIGQLWECLSTTRKDTQK

SEQ ID NO: 631 - protein, 23 aa, Homo sapiens
MFLIQRELLKTLNMIQVLMSVVH

SEQ ID NO: 632 - protein, 15 aa, Artificial Sequence
  modified Homo sapiens FSP
TTSSLVASSQNWGQP

SEQ ID NO: 633 - protein, 11 aa, Homo sapiens
MGEKNQSLWTS

SEQ ID NO: 634 - protein, 24 aa, Homo sapiens
LPVYRQTHWRLYPKPFAGLFPLKP

SEQ ID NO: 635 - protein, 97 aa, Homo sapiens
QPARQARAQDRWRTQRPGPASSPGSRSPSHVRHLHHGWASVPGLPKVAMAPGTPGIRGPHAPPTWLPARPSRLPGSAAAPTLPRALARLPPAVGGCV

SEQ ID NO: 636 - protein, 24 aa, Homo sapiens
RSVKRCKRSLPKGIVKLTLQIYNI

SEQ ID NO: 637 - protein, 14 aa, Homo sapiens
GNFQRTTCHSILSS

SEQ ID NO: 638 - protein, 15 aa, Homo sapiens
LKPYRSVLVLIKMFF

SEQ ID NO: 639 - protein, 8 aa, Homo sapiens
DEKKRKQK

SEQ ID NO: 640 - protein, 23 aa, Homo sapiens
FGRSLNLTVKWLVTSGKRVTSIR

SEQ ID NO: 641 - protein, 19 aa, Homo sapiens
SWCLCCRLIAMKEMTWTKI

SEQ ID NO: 642 - protein, 12 aa, Homo sapiens
KPPPTHPDRGVE

SEQ ID NO: 643 - protein, 82 aa, Artificial Sequence
  modified Homo sapiens FSP
VTPPVARMGRSPTSKPWGMRRAETQTAAPRHLPKQSPDASPPVAPPAWTRPGSTAVSHPGSTPGAPSLATAVPSPLDSSAMS

SEQ ID NO: 644 - protein, 48 aa, Homo sapiens
ANPQLLCQNPEKLALKEDLLYLRTSGEPWDTERNLRPLSLQCQSLALP

SEQ ID NO: 645 - protein, 40 aa, Homo sapiens
NPHFRPPRTWRATTSAQLARCSPWATLPHMPRARSSTAAA

SEQ ID NO: 646 - protein, 37 aa, Homo sapiens
TTAQTAPPSTRMMATCPCPQGWPQCPVAERAVETICP

SEQ ID NO: 647 - protein, 41 aa, Homo sapiens
HPLPTLTCPTMPGRTPTANPPTPSAASYLWPSRTLQPSACQ

SEQ ID NO: 648 - protein, 29 aa, Homo sapiens
EATSNQDLLQMVPCSMQDPLLSLWTLFTE

SEQ ID NO: 649 - protein, 38 aa, Homo sapiens
NVNVCSPKILILKHQKMIRDFRRNLRKWLKSYKGKKQI

SEQ ID NO: 650 - protein, 36 aa, Homo sapiens
ANQEISIVKTIVVCLKVGCVILKMTVVMAAMKKIAQ

SEQ ID NO: 651 - protein, 16 aa, Homo sapiens
AAPMMSSMACGSAESS

SEQ ID NO: 652 - protein, 24 aa, Homo sapiens
RLFWMRRLWCFRQLSGDISRGQSS

SEQ ID NO: 653 - protein, 13 aa, Homo sapiens
EQKKISPFIYFFL

SEQ ID NO: 654 - protein, 11 aa, Homo sapiens
KLKKASVLLFS

SEQ ID NO: 655 - protein, 11 aa, Homo sapiens
DTQIPRTSRWC

SEQ ID NO: 656 - protein, 9 aa, Homo sapiens
SVKKRMIIF

SEQ ID NO: 657 - protein, 10 aa, Homo sapiens
RVPFLFVVQV

SEQ ID NO: 658 - protein, 8 aa, Homo sapiens
LEVGATSS

SEQ ID NO: 659 - protein, 94 aa, Homo sapiens
SRSPKSMSPPGRTQLPPSQLPQPHRHRKTCSRRATPLSSLAAAPGARAGARHPPPTRRQRSLCSSQPSQPRPRSCLGTPLAGLPACPSPCPPVR

SEQ ID NO: 660 - protein, 16 aa, Homo sapiens
RHPPPTRRPSQPRPRS

SEQ ID NO: 661 - protein, 70 aa, Homo sapiens
PLSGTWGTLRAPSSFHPLVATQALLSQRGHPRTALGGSQPLSPRRAAAPTQQLPHALLAPSLQDLAKRPP

SEQ ID NO: 662 - protein, 17 aa, Homo sapiens
RAWAPAPPTRCVWQQPS

SEQ ID NO: 663 - protein, 30 aa, Homo sapiens
TRKASAASCASGVTTSTHRPASAWTSMHQT

SEQ ID NO: 664 - protein, 36 aa, Artificial Sequence
  modified Homo sapiens FSP
VLTVACRSAQPPRPWDHAAPVTCTCGRTRGLGGGTT

SEQ ID NO: 665 - protein, 44 aa, Homo sapiens
KTKNLPLKTKLKKKENKTTLNLQMAEHHLLCPRIMNKAQPYGIC

SEQ ID NO: 666 - protein, 43 aa, Homo sapiens
HPIHIGCTQTMVMGIIFMCLRLCPHILDRLQRGLPGNWELKLE

SEQ ID NO: 667 - protein, 35 aa, Homo sapiens
VSSTHSTTTGSHWKQPTDGAVCTRTSMRSFPTRST

SEQ ID NO: 668 - protein, 27 aa, Homo sapiens
HTWNGPRIGVNVGFSGQTFELLLMLMY

SEQ ID NO: 669 - protein, 21 aa, Homo sapiens
RIKPFSTNSVLRRTGSSIEEL

SEQ ID NO: 670 - protein, 21 aa, Homo sapiens
VTWMKRRRRNLILRKPEWIFK

SEQ ID NO: 671 - protein, 10 aa, Homo sapiens
LEKKESEKWM

SEQ ID NO: 672 - protein, 18 aa, Homo sapiens
VSNWRVKSLPCLPFFSVL

SEQ ID NO: 673 - protein, 9 aa, Homo sapiens
GCTPQLCWT

SEQ ID NO: 674 - protein, 20 aa, Homo sapiens
TFLLWKNWKRALSTRKICSK

SEQ ID NO: 675 - protein, 10 aa, Homo sapiens
EEKKTEHYAY

SEQ ID NO: 676 - protein, 12 aa, Homo sapiens
FLQGVALAVQAS

SEQ ID NO: 677 - protein, 9 aa, Homo sapiens
LMFFCGHQN

SEQ ID NO: 678 - protein, 10 aa, Homo sapiens
IRKKADLHTQ

SEQ ID NO: 679 - protein, 48 aa, Homo sapiens
GAPRSPSSVAGSSSATWQSGAMWVQPPWEQLPGGSCTLRMGLMSTTAS

SEQ ID NO: 680 - protein, 126 aa, Homo sapiens
IRTPGHGSPPARWESPWPVHTRPRSSPGMNSEHSGSAGVVALSRLAMVQSHPMSLSLWPGPSRGHQRSSSLAFPPAGAPWVNSESGGRWRWTRATARPSPWGSHTAPSLGLSEPPPPSSGTSWGQP

SEQ ID NO: 681 - protein, 56 aa, Artificial Sequence
  modified Homo sapiens FSP
TLWTLCSSTPTCLRTCHLMRSLWPPQRPSNSRKFGWQMRASTPAPCLTHCTFWTRL

SEQ ID NO: 682 - protein, 27 aa, Homo sapiens
PPPGWLPRLTRERAAAALRAVGTQISI

SEQ ID NO: 683 - protein, 76 aa, Artificial Sequence
  modified Homo sapiens FSP
SIKKKKNKEGVGREVLVVVVPVAIAELVVLVVLSLALHTVLAQVVLLKGKRDTVGVDLQQSKLDVAGVEAILAELK

SEQ ID NO: 684 - protein, 20 aa, Homo sapiens
LQDGSLDRNLGSPLMSEFRK

SEQ ID NO: 685 - protein, 30 aa, Homo sapiens
RNSYRMDQTFKILYLVILQTGAPGMNIKET

SEQ ID NO: 686 - protein, 43 aa, Homo sapiens
TLSHQIKSSFGQKMGKVIFTNYLPVAFQLVIHSAVMWGRQLKI

SEQ ID NO: 687 - protein, 21 aa, Homo sapiens
LHYLMRWPINLIRRWTSFWEI

SEQ ID NO: 688 - protein, 28 aa, Homo sapiens
TGTKHESGLLKTSQKLSLKKMTQGPCLG

SEQ ID NO: 689 - protein, 24 aa, Homo sapiens
RHPPGSTRYPSFPLRLVPLSLIGP

SEQ ID NO: 690 - protein, 35 aa, Homo sapiens
KRSSRLGWASGRITYSHSPPRGWCSAAWPPRHGWC

SEQ ID NO: 691 - protein, 44 aa, Homo sapiens
TSRPCTSTSTTSLLPMALLCVKRGRRCTKAKATAVSAAVSTEQI

SEQ ID NO: 692 - protein, 13 aa, Homo sapiens
WFAFLSIKKRAAR

SEQ ID NO: 693 - protein, 25 aa, Homo sapiens
LRMSLILSVICSCSWELWGYMICHI

SEQ ID NO: 694 - protein, 26 aa, Homo sapiens
TPSSDPESPGMLARSTPSTTGRWCAL

SEQ ID NO: 695 - protein, 13 aa, Homo sapiens
YITLLYLRKIFKV

SEQ ID NO: 696 - protein, 19 aa, Homo sapiens
QDTLRNLLLQTTLTCWWIH

SEQ ID NO: 697 - protein, 20 aa, Homo sapiens
NTHPLLQACSPSACRCPCHQ

SEQ ID NO: 698 - protein, 14 aa, Artificial Sequence
  modified Homo sapiens FSP
NLQIRRLPRQRLLS

SEQ ID NO: 699 - protein, 26 aa, Homo sapiens
CIHITGMSLLGLHGTMEKSEGMKSFH

SEQ ID NO: 700 - protein, 20 aa, Homo sapiens
GNTANGPGIGRKSLMPMQVT

SEQ ID NO: 701 - protein, 36 aa, Homo sapiens
EAFTLTMVGFSKLISHVLLSYKPFSKGKEHERIPES

SEQ ID NO: 702 - protein, 11 aa, Homo sapiens
GSWGVPWMTSM

SEQ ID NO: 703 - protein, 13 aa, Homo sapiens
TSGTKSSRKSMNS

SEQ ID NO: 704 - protein, 13 aa, Homo sapiens
SSKKRKKGNMWTT

SEQ ID NO: 705 - protein, 19 aa, Homo sapiens
DVAGEENEGPPRPSLMCPR

SEQ ID NO: 706 - protein, 12 aa, Homo sapiens
PEIFLRMNWCVS

SEQ ID NO: 707 - protein, 22 aa, Homo sapiens
HLHRMLYMNRLQPSTQWYKITA

SEQ ID NO: 708 - protein, 12 aa, Homo sapiens
GLPQKELKGIQL

SEQ ID NO: 709 - protein, 11 aa, Homo sapiens
KKKKSNIPKTP

SEQ ID NO: 710 - protein, 21 aa, Homo sapiens
VSPAFLNFMDLLLTIKLELCV

SEQ ID NO: 711 - protein, 9 aa, Homo sapiens
NIIFLSDPG

SEQ ID NO: 712 - protein, 14 aa, Homo sapiens
SPSRAHLWPTRRSS

SEQ ID NO: 713 - protein, 12 aa, Homo sapiens
NMVKMLVFILKL

SEQ ID NO: 714 - protein, 10 aa, Homo sapiens
IAMTMDQYPF

SEQ ID NO: 715 - protein, 13 aa, Homo sapiens
PPFFTIDLVTTCI

SEQ ID NO: 716 - protein, 8 aa, Homo sapiens
CKKKNDGT

SEQ ID NO: 717 - protein, 10 aa, Homo sapiens
MTGFLTPRDF

SEQ ID NO: 718 - protein, 13 aa, Homo sapiens
LPPPWTAQLPCIS

SEQ ID NO: 719 - protein, 11 aa, Homo sapiens
RLIEIKVPSQK

SEQ ID NO: 720 - protein, 11 aa, Homo sapiens
GEKKYNVFHMK

SEQ ID NO: 721 - protein, 8 aa, Homo sapiens
KAFFLPVR

SEQ ID NO: 722 - protein, 109 aa, Artificial Sequence
  modified Homo sapiens FSP
AHPRPPALSLRSLQRSPALRARWSTSFCLAPKRPLLLTPREQTWLDPDPANAPCRCSAPANQPRTESPPPLPADLPHSSGLALCGIVSTSSHLILLWLLGSRMAHPRLP

SEQ ID NO: 723 - protein, 131 aa, Artificial Sequence
  modified Homo sapiens FSP
STATAPWTSASSTRSAKWATSTGARCLTSGAAAACWRRCSATSRGRARSPRVRSRTLPKLCLWWMTNLTTRRSTRRSCWTSPGMHTQTSRAPQPSRAQTWRTSPHCGIDTPVWLSQNCLRAPLTRTGRGLC

SEQ ID NO: 724 - protein, 70 aa, Homo sapiens
VKTGSSWTGSCRQGWRWSGSDCGISITTTTPRGACGASAAGRALARGRLEDGQPLPAPVGVPRQLLGAGL

SEQ ID NO: 725 - protein, 13 aa, Homo sapiens
SATRMPGPVPAPS

SEQ ID NO: 726 - protein, 40 aa, Homo sapiens
GPPTAQCQHPPEPLFLQADQATCLRGFARIASSCHPHHQF

SEQ ID NO: 727 - protein, 57 aa, Homo sapiens
GPPTVTRPPTPTTEPSPPTSTTLWSSAFSATRMPGIPAGLGLGFGRAEGAQEGKARV

SEQ ID NO: 728 - protein, 81 aa, Artificial Sequence
  modified Homo sapiens FSP
TGGRRMTRRTMTTTKMMMMRRTKRRRRKRRRMTMMTRRTLLTKKTCLTPRTSAATKALPRQTISQRRPIQTPPGTSLAIWG

SEQ ID NO: 729 - protein, 68 aa, Artificial Sequence
  modified Homo sapiens FSP
VPGLRAKVWRGSPEWDPERRCLLPLPSCAGPGDQARMRTSAVSCCRSPWTPCEHFPRPRSCGWRWWRE

SEQ ID NO: 730 - protein, 16 aa, Artificial Sequence
  modified Homo sapiens FSP
TYGAWASRWWSWQQDS

SEQ ID NO: 731 - protein, 117 aa, Artificial Sequence
  modified Homo sapiens FSP
QTPPSRTMTSGPTYGAWASRCPARLPPRWSWQQDSFPTRTARRTLRSSPKSYRKSPRFCPDTWASRGTSSPSSKTALLKITGRDQSIISYLNTWRWTWRPGSRMSWRRLSHRGLAAS

SEQ ID NO: 732 - protein, 32 aa, Homo sapiens
WVLICLDLFRQKFRKPLMLQESLFQMIFSSIF

SEQ ID NO: 733 - protein, 95 aa, Artificial Sequence
  modified Homo sapiens FSP
LPMPPPPRRPLPPPPRAAQRTVTRGKRLNNRAPLGEATGSRRQGEQNTEDSRKAKPDFWKVQNSFGSLVPEREKMLVPGGTRVCQHAKIGPCYMK

SEQ ID NO: 734 - protein, 64 aa, Homo sapiens
NRFRLCITILPGMKMSWSSEKVMSLMSWKSVMTAGLWGPQEEPNSLVLSPETTSRGCELRSLLL

SEQ ID NO: 735 - protein, 66 aa, Homo sapiens
LLLRILRLRRHLPPAAGLPVTGSPRSFTDTITYRDSRFLRPSKRPSWYNILTVNRPVVILARTQTT

SEQ ID NO: 736 - protein, 81 aa, Homo sapiens
LPLPPVPFLDCLSCPGRNAWWLQVPGELGTLADRERGPWSPTHSAQSPVPLRIHFCPVHRPPWHGLMAADRAWGLFTPAPT

SEQ ID NO: 737 - protein, 42 aa, Homo sapiens
DQWCPDGSHLGQPRQLPRDRRPRTSHISALIAARGLCSAAAS

SEQ ID NO: 738 - protein, 23 aa, Homo sapiens
NLAIVEEEMFLVMGELNYVPLAL

SEQ ID NO: 739 - protein, 52 aa, Homo sapiens
PYFWRTLQPMEMHFFFCQHFPSGPTRVPLSKYTTRSKSLKQDKRFYFSIPST

SEQ ID NO: 740 - protein, 44 aa, Homo sapiens
RRCEVQHSSVTREKTGCGFSAVNKTQEVFWWKNTLYLIKIHYMK

SEQ ID NO: 741 - protein, 22 aa, Homo sapiens
PQPGNQRSNRSLPGTTRMRHRV

SEQ ID NO: 742 - protein, 52 aa, Homo sapiens
TRTSLHQATRKHIIIPLERRSPQAHKLWMIVIIKDIFLMKRFLTLASAHVGV

SEQ ID NO: 743 - protein, 42 aa, Homo sapiens
GSLLGLSLAQPEALKVAARLRCQHPQHHHRRRVQCSLSRVRR

SEQ ID NO: 744 - protein, 30 aa, Homo sapiens
GSNSNLGMKCGIQNQMLVIQQEAGFGILHT

SEQ ID NO: 745 - protein, 40 aa, Artificial Sequence
  modified Homo sapiens FSP
QSQGGGAGGESQRANSARRPLGRIQGRCRAAGPACGRGRA

SEQ ID NO: 746 - protein, 31 aa, Homo sapiens
PEQLTLPISQQKPSPVLGKLEMVKAVQLRVA

SEQ ID NO: 747 - protein, 58 aa, Homo sapiens
FMRNFLNMLCFENILLHLHQIMKFLLRQPGQGIWKLRLIQPSLWLSLWIRPNLLLFHI

SEQ ID NO: 748 - protein, 32 aa, Artificial Sequence
  modified Homo sapiens FSP
HPQSHLHPLGLPHLPHPHCQTTRAPCQDWPLP

SEQ ID NO: 749 - protein, 62 aa, Homo sapiens
PPAGKNLMKSPQWWGSSVHLAWSSQSLSLHGSAVRENHPSLTRLLHTSLCMCLRELIFTLKT

SEQ ID NO: 750 - protein, 53 aa, Homo sapiens
MEYCPPLNSCASVCASWSLDGCHPLWSWHSSRAGRAGGQGAQDCPCIAELWQC

SEQ ID NO: 751 - protein, 44 aa, Homo sapiens
LWLWAGWTVWWSCGPGEKGHGWLPSLPTMALLLLRFSCMRVASY

SEQ ID NO: 752 - protein, 44 aa, Homo sapiens
VMPLHHGLTQKMISETCSVRSFMDLKIKLAMKIGGVSLTSFLFP

SEQ ID NO: 753 - protein, 29 aa, Homo sapiens
AAATTLTSAASSAGSSWTPGRRGGTCASS

SEQ ID NO: 754 - protein, 22 aa, Homo sapiens
NLLVSTQLGTAASPTQHQQLPR

SEQ ID NO: 755 - protein, 27 aa, Homo sapiens
WREAWRRSSWPRWTMAWAQHGSPAIGG

SEQ ID NO: 756 - protein, 54 aa, Homo sapiens
SVSRKAGLVSSTKPLVQLGFTLKRYRSFLNIEFLQTPKLTRKLSEWSRRKLLTC

SEQ ID NO: 757 - protein, 32 aa, Homo sapiens
VVKTVALGHLTIRNVASVDPGQTVLWMESLCL

SEQ ID NO: 758 - protein, 9 aa, Homo sapiens
CHWGAAPGS

SEQ ID NO: 759 - protein, 25 aa, Artificial Sequence
  modified Homo sapiens FSP
GPVYYVCNHMNVSSVLKPSLFTVPI

SEQ ID NO: 760 - protein, 30 aa, Homo sapiens
TSQRIPCSLQKKMHLKYGLFSTFYLRTSIH

SEQ ID NO: 761 - protein, 27 aa, Homo sapiens
ALQVFSSTGLKRTLIERVSMDTAFRES

SEQ ID NO: 762 - protein, 12 aa, Homo sapiens
PAPATQAPCMMT

SEQ ID NO: 763 - protein, 31 aa, Homo sapiens
KTAKTLCGHRMDPQPRSCSSLWSWQLKPCPC

SEQ ID NO: 764 - protein, 34 aa, Homo sapiens
LVKVQTHISVIPSLESSPLGVQDWGNPSALIQNS

SEQ ID NO: 765 - protein, 32 aa, Homo sapiens
LLWEDRAKNTQALPLPLSGEALSIGPALQLKV

SEQ ID NO: 766 - protein, 28 aa, Homo sapiens
RKSLILCKTNLLVFINDSRRHLDSMEKF

SEQ ID NO: 767 - protein, 22 aa, Homo sapiens
WTRSQKGKASLTIGGWRICCSL

SEQ ID NO: 768 - protein, 24 aa, Homo sapiens
RHPLQSLHHPPCSLSAATQAIPPR

SEQ ID NO: 769 - protein, 40 aa, Homo sapiens
VRILEISSHFLHILRSQKMIQLNLTVMKKILLLFFHHHLV

SEQ ID NO: 770 - protein, 38 aa, Homo sapiens
NLRNQSVAMADWREMKSVIVVLRLNVDLQAVVIFELVY

SEQ ID NO: 771 - protein, 25 aa, Homo sapiens
RIKASSMPQTPERQTLPHLTSLPSR

SEQ ID NO: 772 - protein, 20 aa, Homo sapiens
LRTKLCFAPCTNQREFMSKN

SEQ ID NO: 773 - protein, 44 aa, Homo sapiens
RKSPVTGNMRHWPCLKDRKQAERPGLICRNPSLLWAWMMKLHNY

SEQ ID NO: 774 - protein, 13 aa, Homo sapiens
VIPPIQCFILMYF

SEQ ID NO: 775 - protein, 13 aa, Homo sapiens
KEKKSRTLMKMIS

SEQ ID NO: 776 - protein, 24 aa, Homo sapiens
HPLPKMNTTRMGIWISPGAGPGLH

SEQ ID NO: 777 - protein, 12 aa, Artificial Sequence
  modified Homo sapiens FSP
NKWNAMVVLNKG

SEQ ID NO: 778 - protein, 19 aa, Homo sapiens
QRPLPGNGVRKAQNGWCRH

SEQ ID NO: 779 - protein, 21 aa, Homo sapiens
LWSSRHTSLRITHKRHGSIPL

SEQ ID NO: 780 - protein, 13 aa, Homo sapiens
SQEILVIALLLKR

SEQ ID NO: 781 - protein, 15 aa, Homo sapiens
TWRKLADSLVCSWIT

SEQ ID NO: 782 - protein, 12 aa, Homo sapiens
CHLVSTCQTIPS

SEQ ID NO: 783 - protein, 11 aa, Homo sapiens
LEILRRSSLGR

SEQ ID NO: 784 - protein, 27 aa, Homo sapiens
LENLDSRQKFPFDLIIMANMYQWIRVR

SEQ ID NO: 785 - protein, 16 aa, Homo sapiens
LPIMPCWSPCLAGSLW

SEQ ID NO: 786 - protein, 11 aa, Homo sapiens
MSLLQRTVSQQ

SEQ ID NO: 787 - protein, 8 aa, Homo sapiens
KQKKNWQS

SEQ ID NO: 788 - protein, 19 aa, Artificial Sequence
  modified Homo sapiens FSP
MLKNVRGNNSKLKYRRKRK

SEQ ID NO: 789 - protein, 22 aa, Homo sapiens
SAIKQRKQRTMWSGKPSLWSSG

SEQ ID NO: 790 - protein, 13 aa, Homo sapiens
KEKKLRLAVLVNN

SEQ ID NO: 791 - protein, 14 aa, Homo sapiens
GLASPLAACRLTSP

SEQ ID NO: 792 - protein, 11 aa, Homo sapiens
ISKKQNALAEH

SEQ ID NO: 793 - protein, 13 aa, Homo sapiens
GQKKIRKTSQVLT

SEQ ID NO: 794 - protein, 11 aa, Homo sapiens
SEKCRSSLDWR

SEQ ID NO: 795 - protein, 10 aa, Homo sapiens
EKMCWFRTGM

SEQ ID NO: 796 - protein, 13 aa, Homo sapiens
AHKKAMKKATKSS

SEQ ID NO: 797 - protein, 10 aa, Homo sapiens
FTPFLVHKMF

SEQ ID NO: 798 - protein, 20 aa, Homo sapiens
AGRAAPAPSPRTAAACPTPV

SEQ ID NO: 799 - protein, 9 aa, Homo sapiens
VRYPRARPR

SEQ ID NO: 800 - protein, 9 aa, Homo sapiens
QLLKMRSWN

SEQ ID NO: 801 - protein, 11 aa, Homo sapiens
VIHFKKSKIIW

SEQ ID NO: 802 - protein, 12 aa, Homo sapiens
GPTPLLLSSGFY

SEQ ID NO: 803 - protein, 10 aa, Homo sapiens
NQLTRDWKAS

SEQ ID NO: 804 - protein, 11 aa, Homo sapiens
LIEEFTHLCSL

SEQ ID NO: 805 - protein, 12 aa, Homo sapiens
AVEKSPHLRWLI

SEQ ID NO: 806 - protein, 12 aa, Homo sapiens
SLPNLKHCLMMS

SEQ ID NO: 807 - protein, 10 aa, Homo sapiens
AGSGSDTQRD

SEQ ID NO: 808 - protein, 8 aa, Homo sapiens
TDKKVWLM

SEQ ID NO: 809 - protein, 11 aa, Homo sapiens
IVKKGEEGGRM

SEQ ID NO: 810 - protein, 15 aa, Homo sapiens
TSMTSTWTGLLRSRC

SEQ ID NO: 811 - protein, 8 aa, Homo sapiens
DCQKSHSS

SEQ ID NO: 812 - protein, 9 aa, Homo sapiens
RAFFISHSL

SEQ ID NO: 813 - protein, 8 aa, Homo sapiens
LNQKNSVI

SEQ ID NO: 814 - protein, 11 aa, Homo sapiens
QLQKTAPGLNI

SEQ ID NO: 815 - protein, 12 aa, Homo sapiens
KGKKNVLRLTSC

SEQ ID NO: 816 - protein, 10 aa, Homo sapiens
LKKILQDYQS

SEQ ID NO: 817 - protein, 10 aa, Homo sapiens
FFTTCGNRRS

SEQ ID NO: 818 - protein, 11 aa, Homo sapiens
LAQWAPAASPA

SEQ ID NO: 819 - protein, 10 aa, Homo sapiens
LAGRAMGRAP

SEQ ID NO: 820 - protein, 8 aa, Homo sapiens
TGKKNCSI

SEQ ID NO: 821 - protein, 10 aa, Homo sapiens
KDLFCRGISL

SEQ ID NO: 822 - protein, 8 aa, Homo sapiens
GTPPSPVS

SEQ ID NO: 823 - protein, 36 aa, Homo sapiens
WQCLEPSRFYVPWEASVVTFFAAGSAKMSCQSWLAP

SEQ ID NO: 824 - protein, 23 aa, Homo sapiens
STSASCSSSFSLVMTLTLDTWRL

SEQ ID NO: 825 - protein, 15 aa, Homo sapiens
RPENSQINSSLCNEA

SEQ ID NO: 826 - protein, 8 aa, Homo sapiens
IRKKRCVY

SEQ ID NO: 827 - protein, 58 aa, Homo sapiens
TTLAFQKSLPWPKLLPKTRSMTHLTEKPRKKSLLGPLTQIHQILLSKFSFFQLLCTRD

SEQ ID NO: 828 - protein, 11 aa, Homo sapiens
MNLPFGSFMSQ

SEQ ID NO: 829 - protein, 8 aa, Homo sapiens
PDPPTGIG

SEQ ID NO: 830 - protein, 11 aa, Homo sapiens
LCKKIMMRSIQ

SEQ ID NO: 831 - protein, 10 aa, Homo sapiens
TPRTGGPRCW

SEQ ID NO: 832 - protein, 11 aa, Homo sapiens
PTFFISPNKTH

SEQ ID NO: 833 - protein, 18 aa, Homo sapiens
HKWLKFCLLRVVKESFHE

SEQ ID NO: 834 - protein, 214 aa, Homo sapiens
VAAPSPGCTLARAPSTPVKTVWATHRARVPPACLLHSWISLKSSCQFNKMASTHYHTSEGQQGQGPGQRQGRALPQSPAVRALAASGTWFILCRSSLPSPTLWRRRGSGTIMGPRLREEVALEETATPARALEAPTPPITTITTTITTTTSPGTARGARARTARGMGGTRPSPQAGGVPMTTWTVIAASWRVGGPLGSLVVPSAWRVQMGPTGT

SEQ ID NO: 835 - protein, 140 aa, Artificial Sequence
  modified Homo sapiens FSP
SLRKKRRKSPITRNLRHWPCLKDHKWAVRLGLICRNPGLLWACMVKLQEYQHLLIKTSLRKKRKSPITRNLRQWPCLRASRVHTLKDHRWAVRLGLWKAVQLLKGSRNPTVQRRSSKGHECLVMIFQCPVRTLRAHSLIQ

SEQ ID NO: 836 - protein, 90 aa, Homo sapiens
QHCPPVPGSASLFHRRRTQGHPALHQCLSLTMSSAWPPTVTIWMCRHPRPQLSLTLPQLSLTQPQPPVKVRTKAAGGPCLPRRAPQGVNP

SEQ ID NO: 837 - protein, 39 aa, Homo sapiens
LGSIRGLNGNQMRMESLPSTAGTENGTSRQQLLRKTWSF

SEQ ID NO: 838 - protein, 14 aa, Homo sapiens
TVLSLVTISRFVLS

SEQ ID NO: 839 - protein, 19 aa, Homo sapiens
NSNIQLMTTRNFWPMASAI

SEQ ID NO: 840 - protein, 13 aa, Homo sapiens
WEKKRGTKSMKVT

SEQ ID NO: 841 - protein, 12 aa, Homo sapiens
STFFHEDLVRIP

SEQ ID NO: 842 - protein, 8 aa, Homo sapiens
WEKKWVRS

SEQ ID NO: 843 - protein, 11 aa, Homo sapiens
NVPLTKLSEVF

SEQ ID NO: 844 - protein, 17 aa, Homo sapiens
LWDPSRRRTTTVPISTS

SEQ ID NO: 845 - protein, 11 aa, Homo sapiens
LQKKISWNLSL

SEQ ID NO: 846 - protein, 9 aa, Homo sapiens
KEKKQWKKN

SEQ ID NO: 847 - protein, 154 aa, Artificial Sequence
  modified Homo sapiens FSP
VPLPRSLLRQPVQLRTEPARSSCISTASTTESTPTASSAMAVTRSSRGCWPAPSRPTASTPAGRGAFPPKCCSGMCTSHHAPWPSGPRTSTAVPGSACQGAVTPTSAEIWFLPSPDALSMGSSSPQWLGTLLWTFCGLRWGCPWPPCSSWRQPQ

SEQ ID NO: 848 - protein, 29 aa, Homo sapiens
QELKEAVKFSIVKNNSNNKCGIQPGLPIL

SEQ ID NO: 849 - protein, 16 aa, Homo sapiens
VSGSWSLGHPWCCLGL

SEQ ID NO: 850 - protein, 22 aa, Homo sapiens
LTLNSLRWPLQLSNLAGSQISW

SEQ ID NO: 851 - protein, 29 aa, Artificial Sequence
  modified Homo sapiens FSP
SERCLLVCLLSLCKMGPTILLTFGVHQMG

SEQ ID NO: 852 - protein, 12 aa, Homo sapiens
RPCWSRCSLRQM

SEQ ID NO: 853 - protein, 34 aa, Homo sapiens
CVGCQFIVPTRGAPLMARVHTEHSRVLLSPSFTC

SEQ ID NO: 854 - protein, 19 aa, Homo sapiens
NYRKLYQKQLEKRIKHLCS

SEQ ID NO: 855 - protein, 11 aa, Homo sapiens
SATPLPHYLAH

SEQ ID NO: 856 - protein, 11 aa, Homo sapiens
TSSLTMESSGH

SEQ ID NO: 857 - protein, 12 aa, Homo sapiens
LMFFGNQSIITL

SEQ ID NO: 858 - protein, 11 aa, Homo sapiens
LNHQKGKFMNF

SEQ ID NO: 859 - protein, 160 aa, Homo sapiens
AIRGLTVASSLPWTTPASGGVSRYISRCAPPATAWTSWPTATWWACATRRMKLRSWLRRWRFKTAPMKMGRCSCGQGSCSTISQNHTPTVRLLELPTTEHCPLTSATSCELGMVVRTTSSPCSRATASHPPGCHCGKVSTSTPTFLARPLPWPLPSTQMS

SEQ ID NO: 860 - protein, 85 aa, Homo sapiens
RGRTSGRSLSCCPRPRCRPAVASRSTAPSPRAGSRRCCLRTSCGAARPRRTRSAWGDWVASPPTRSSSRTACGAASPPARSWSAP

SEQ ID NO: 861 - protein, 60 aa, Homo sapiens
LHLYLQDLDFIFINKGLHLKHSIQDVQFMKITMAKQLLKIPCMTPTQSQWKGRRYDLIPT

SEQ ID NO: 862 - protein, 105 aa, Homo sapiens
HTATKAYTSPHAEGEFCPGETDTPDMGEGLSGNTETKRERGFRTSPPFISKPQRALWSPPCPSPGPPSLTSGLSCSWCAPCTGAGWVGKWAGLQLPFYPQWQLPP

SEQ ID NO: 863 - protein, 63 aa, Homo sapiens
EKACGHPPTDRAETLLKFLLKGILALAIGPAGALAGPVLTTLGTQRPLPWAAPCPATASPSPL

SEQ ID NO: 864 - protein, 35 aa, Artificial Sequence
  modified Homo sapiens FSP
AAARWKACLWPVAPRCSRWPPAILPASTPPSAPPT

SEQ ID NO: 865 - protein, 31 aa, Homo sapiens
TALPRSSSQGSVWQLPGNGLQSQAGALRMIS

SEQ ID NO: 866 - protein, 23 aa, Artificial Sequence
  modified Homo sapiens FSP
QQVPGLMKTGPSWMEAWNQMGPT

SEQ ID NO: 867 - protein, 25 aa, Homo sapiens
ASRWNPLRRTRALRGPPRQRAAAPH

SEQ ID NO: 868 - protein, 21 aa, Homo sapiens
YSYPSSLSVFSVPGYHLYYFR

SEQ ID NO: 869 - protein, 21 aa, Homo sapiens
IFYIFSWICPPTKKQRHKIQL

SEQ ID NO: 870 - protein, 19 aa, Homo sapiens
SIQHLQAPSPSLWPWNMLC

SEQ ID NO: 871 - protein, 12 aa, Homo sapiens
SASKNGNKKNSR

SEQ ID NO: 872 - protein, 9 aa, Homo sapiens
ESLKNTLNQ

SEQ ID NO: 873 - protein, 12 aa, Homo sapiens
NTLNQSPEHATR

SEQ ID NO: 874 - protein, 19 aa, Homo sapiens
LTDFFVLWKASGTIQFNCK

SEQ ID NO: 875 - protein, 10 aa, Homo sapiens
LAAFLNFVMH

SEQ ID NO: 876 - protein, 12 aa, Homo sapiens
PPKKFSILPSSR

SEQ ID NO: 877 - protein, 22 aa, Homo sapiens
WDQRKRKMGKVISKGNDLSKTG

SEQ ID NO: 878 - protein, 10 aa, Homo sapiens
WASTIRDRCV

SEQ ID NO: 879 - protein, 11 aa, Homo sapiens
CQLIENVPLLL

SEQ ID NO: 880 - protein, 12 aa, Homo sapiens
KTPPGLLRNTQQ

SEQ ID NO: 881 - protein, 10 aa, Homo sapiens
AGARGEIAVM

SEQ ID NO: 882 - protein, 10 aa, Homo sapiens
EKIPRGPSAS

SEQ ID NO: 883 - protein, 10 aa, Homo sapiens
QLPKMAPFMM

SEQ ID NO: 884 - protein, 9 aa, Homo sapiens
KDKKQIMKC

SEQ ID NO: 885 - protein, 165 aa, Artificial Sequence
  modified Homo sapiens FSP
TNALTLAQWSPVIAASPSASTQARCATSAAATTSPPTSAPTQAKSPSPATSVEESLPGAMNARGIPRSTCGRRTRKQTKVLWPLRPPPLSLPTRPRLLPLTRPRLLPLIHPRPPPHTHLPAPRPTHPLCTVASPPRRWPPRTPLFPLLSRPRSAASLAPPQGFRT

SEQ ID NO: 886 - protein, 49 aa, Artificial Sequence
  modified Homo sapiens FSP
GAWELGGLARWGPLCTHPQCQVLLLVEDVLCAKWFICPASFNPQNDSMR

SEQ ID NO: 887 - protein, 34 aa, Artificial Sequence
  modified Homo sapiens FSP
RNLILMIKVHKFLHNLSKYTDKLQKARMLLPPKA

SEQ ID NO: 888 - protein, 80 aa, Homo sapiens
RKQLYIQNALNLSRPHSARLTASDTTRTRTCRTWRRSSASAASAWRRSFAASCTRGTSCTPWRAKISTMSTYREKLSGFP

SEQ ID NO: 889 - protein, 100 aa, Homo sapiens
LPWMVPWGMEALGSWGQTDLTVLGQPGVRALGKWLQWPHPDPAGSPRPGPRGGHPQPRPSTPASPGNRGLPLPPPVWAVLAWARAHLAVEACLRTHGCSG

SEQ ID NO: 890 - protein, 35 aa, Homo sapiens
SRPRHRVRKRRCPHCRSSLPGRHRLQSCRPSPDPR

SEQ ID NO: 891 - protein, 40 aa, Homo sapiens
APACHWLARLGWRVSEEPVLSSLTSLRIELLLSSCSSRWG

SEQ ID NO: 892 - protein, 62 aa, Homo sapiens
MKMACGKRSLLQEVKKHELPKKAPSWPDRPLVGLARIQIWILHLLGLRPPSLLSVFQMTFIK

SEQ ID NO: 893 - protein, 42 aa, Homo sapiens
AAAPRSTPRATRPSCAGPSRRAARASTAKSASSRMASTSCAA

SEQ ID NO: 894 - protein, 38 aa, Homo sapiens
RAGNFAIMEIQCPALRKTLPILFGSLRRQNMSLEMWCR

SEQ ID NO: 895 - protein, 38 aa, Homo sapiens
RVWSFLFLRQRATSTITIACTKESLNSQNSSFIFSLLI

SEQ ID NO: 896 - protein, 17 aa, Homo sapiens
KDQRIIKVAPLVEDKMI

SEQ ID NO: 897 - protein, 34 aa, Homo sapiens
IAQLMKDQRIIKVPQIVCGLRIVLRKKRTVFLRQ

SEQ ID NO: 898 - protein, 31 aa, Homo sapiens
IQDQDQELATVLLQSALDCIFGVEEMATKKH

SEQ ID NO: 899 - protein, 58 aa, Homo sapiens
PSLNLISHQSSVGCSKGIWRAPEMTLFSTPTFAASSPWASMSWVSSGCSLPLWSSSCC

SEQ ID NO: 900 - protein, 42 aa, Homo sapiens
CTLGGSVTQKLKMTATGVPVIPPLVISWWAGTRSLWLLLPVG

SEQ ID NO: 901 - protein, 40 aa, Homo sapiens
GGTGTDMTTQKLMMVPNQCKLELELSLRNYALESSQVPMK

SEQ ID NO: 902 - protein, 28 aa, Homo sapiens
NLLQKEIPLLQLSLLTDSKRNHGHPQLT

SEQ ID NO: 903 - protein, 23 aa, Homo sapiens
NVLCKQQNGLPAPEHVGWEYLTG

SEQ ID NO: 904 - protein, 17 aa, Homo sapiens
GKGMKKIKKCLHANQQE

SEQ ID NO: 905 - protein, 18 aa, Homo sapiens
NNLCQRLHWRLRHVIVLI

SEQ ID NO: 906 - protein, 13 aa, Homo sapiens
EQLFLKLQEANGI

SEQ ID NO: 907 - protein, 27 aa, Homo sapiens
MLTALPPAMTAMCGYGIRGNPVQQWNI

SEQ ID NO: 908 - protein, 19 aa, Homo sapiens
LNVTCFVIFRRVRNELQKW

SEQ ID NO: 909 - protein, 28 aa, Homo sapiens
VIMSITGKKEESNRSKALSEATPFHWIT

SEQ ID NO: 910 - protein, 27 aa, Artificial Sequence
  modified Homo sapiens FSP
LAVSAVTGRARSLGLSKVSSEPGLMST

SEQ ID NO: 911 - protein, 16 aa, Homo sapiens
LKTFHMKCFLNLSQME

SEQ ID NO: 912 - protein, 8 aa, Homo sapiens
PDKKSRNC

SEQ ID NO: 913 - protein, 9 aa, Homo sapiens
NIRARQEGN

SEQ ID NO: 914 - protein, 13 aa, Homo sapiens
LSNIRARQEGKSG

SEQ ID NO: 915 - protein, 21 aa, Homo sapiens
ARGTSPIRHCSHSSSCSGPSS

SEQ ID NO: 916 - protein, 20 aa, Homo sapiens
FREKRNYVKKKSKLKKKEKK

SEQ ID NO: 917 - protein, 22 aa, Homo sapiens
SRTALITHTLCCWLTWAQVSAF

SEQ ID NO: 918 - protein, 21 aa, Homo sapiens
RRRSLPCGWTLLYLSSAWRMK

SEQ ID NO: 919 - protein, 9 aa, Homo sapiens
LRPPWPSWS

SEQ ID NO: 920 - protein, 18 aa, Homo sapiens
IQASTSPSSQHGCMRDLP

SEQ ID NO: 921 - protein, 10 aa, Homo sapiens
EVTRCCFFHK

SEQ ID NO: 922 - protein, 20 aa, Homo sapiens
APSLTFSPSGLMEIWISASV

SEQ ID NO: 923 - protein, 15 aa, Homo sapiens
VILQVRSTACENSPK

SEQ ID NO: 924 - protein, 12 aa, Homo sapiens
ISKKCSLSHQEK

SEQ ID NO: 925 - protein, 18 aa, Homo sapiens
LRFLRTMKQWPKFCSAGI

SEQ ID NO: 926 - protein, 11 aa, Homo sapiens
TPLKNEDFISC

SEQ ID NO: 927 - protein, 10 aa, Homo sapiens
WTCLKMSIGA

SEQ ID NO: 928 - protein, 11 aa, Homo sapiens
DGWGAMALTRG

SEQ ID NO: 929 - protein, 11 aa, Artificial Sequence
  modified Homo sapiens FSP
AWKAVLVERGP

SEQ ID NO: 930 - protein, 16 aa, Homo sapiens
NSLGIIWPKSGLILTA

SEQ ID NO: 931 - protein, 14 aa, Homo sapiens
PWKNSESMKKVKCI

SEQ ID NO: 932 - protein, 12 aa, Homo sapiens
IYIFCLHYGTQL

SEQ ID NO: 933 - protein, 9 aa, Homo sapiens
FSKKARKQS

SEQ ID NO: 934 - protein, 12 aa, Homo sapiens
QNKKVMSMEMIL

SEQ ID NO: 935 - protein, 10 aa, Homo sapiens
SQKTVSSGKV

SEQ ID NO: 936 - protein, 10 aa, Homo sapiens
YSKKAKERQN

SEQ ID NO: 937 - protein, 11 aa, Homo sapiens
INKKTSRIFPA

SEQ ID NO: 938 - protein, 11 aa, Homo sapiens
LNKMNSGWSLK

SEQ ID NO: 939 - protein, 9 aa, Homo sapiens
LAFFTTYMA

SEQ ID NO: 940 - protein, 10 aa, Homo sapiens
RSQGAGPVAT

SEQ ID NO: 941 - protein, 11 aa, Homo sapiens
KVKKQDPKPIN

SEQ ID NO: 942 - protein, 10 aa, Homo sapiens
LVGGAGHGRW

SEQ ID NO: 943 - protein, 193 aa, Homo sapiens
SVSCGSNTTTCIWLPHPRRTRACRWSFLSSIRWCRCFPSTSRSWRRRASGTTLLSSTSCWTSSWTSATPRPPTARSCRSTSLRKATSWKQGPRGHQPPSPTRCPGGPKASSIGRMRCSWTSSSLSTSWVNTQEWDGWVTRSAPTAMSCAARSWAPSRCESSSRACPSCAWASTTRSSLTTRAAAKANPWSWRM

SEQ ID NO: 944 - protein, 16 aa, Homo sapiens
SSSLSTSWSAPTAMSC

SEQ ID NO: 945 - protein, 82 aa, Homo sapiens
RTPASCVRTLTWTWQWSVPIRECSSTKASVARQPPGCSWRSRSTLSLSGGAWSMPRNGPWETPSMSKQNRGLRLIKSSSTKS

SEQ ID NO: 946 - protein, 174 aa, Artificial Sequence
  modified Homo sapiens FSP
SSSRTPRRQRSSTTPPASSGTSAQPLRPLARRCGSATGWWTPWSPLSTTPWTRANARTRAWRTRCASCGTCPTASTTRCRRPRCSGWRVAAAGTWRGRRRERSWAASRRRAGGCASCPSPPMRSPSRRCPRTPRASSGCGAPRSWGCTTGCCSAARPPGRCRTSRQATAGGRGC

SEQ ID NO: 947 - protein, 60 aa, Homo sapiens
GPSWTWGRAPRTESSQPRGSSSCSARWCLGRCCCSGNDGRTRSSGWMPGMNMKMKTFMKA

SEQ ID NO: 948 - protein, 163 aa, Artificial Sequence
  modified Homo sapiens FSP
SLLVWPVGRNWQLAGPLTPTRGLTRTTHPGVPRGSLMTWPLTGHQRGAWPPGLPPEPEVPPALECWDPTPQSPSWPLQFLGPLAPAHHSGSHSEYPMSSSGLPCSWWWTQATPAPTWTTSSRLARAPRASCASPPCAARASWWPSRRWTCASSRGASCSSTRW

SEQ ID NO: 949 - protein, 74 aa, Homo sapiens
MDTLALHDPHPMATSGGLSLHPDPLPGHQFPLEAHFEALSLSKFTFSFLLLHFPNIFSIPWTNQRCCSSLGQRY

SEQ ID NO: 950 - protein, 52 aa, Homo sapiens
NKETFWCERVMGNLVNMSFLYILMDRGDILSYNMLITCIDSRALGFQTFLNL

SEQ ID NO: 951 - protein, 38 aa, Homo sapiens
CHPLWEQLDTEPTPRLCSARKENQRWSLRPAARRPWRS

SEQ ID NO: 952 - protein, 58 aa, Homo sapiens
CYLHHWNYLSFLKGQIIREMSFHLLNYRTSNISHQWIRLHFQKALEIKHISKGVHRVG

SEQ ID NO: 953 - protein, 103 aa, Artificial Sequence
  modified Homo sapiens FSP
WCSPDSSSSPRTRSSGCPSYAGRRPTQSLSQPGWCPLSRPSWPPLPATSSPPPASTSLMTNTGCPLPTRNLLCPCSSVTGTSTRSKGMEGTTERPEPRAARGP

SEQ ID NO: 954 - protein, 64 aa, Homo sapiens
HLLPCLEKQECHLLLPLFLVVLESLHLLHFPEALAFLHLHPEWVCLHLPHLDLEFLQPQFCHLD

SEQ ID NO: 955 - protein, 45 aa, Homo sapiens
HAGACTEEIAILMRLTSPNASVLAATPENIVKWRFQKASLQEQPQ

SEQ ID NO: 956 - protein, 41 aa, Homo sapiens
WIQLDFDFRLMRKENPKLHTWCSWRSLKKKDSWHHIEGGFQ

SEQ ID NO: 957 - protein, 14 aa, Homo sapiens
IQLDFDFREWLMCC

SEQ ID NO: 958 - protein, 78 aa, Homo sapiens
ADFTEPGQAISPHPTLELSPATSNPHPLGPQIWPPGLPPSHMLPSPHLATRVSRLTCDIFPMEESWDLQLAIMDCSDF

SEQ ID NO: 959 - protein, 74 aa, Homo sapiens
RWLPGGGSPWTSRRGPPWSSTTPCTQGVREGTASGKTRGEAMGSGQATVTSMSPGPPCRGSGASSFIRHTGNPP

SEQ ID NO: 960 - protein, 49 aa, Homo sapiens
PQQRAPLVELKILARGSHSSRPGSHPRRHIQSQLSQALELGQPSTDFIL

SEQ ID NO: 961 - protein, 45 aa, Homo sapiens
VGPKKGARHRWPVPAPLLSASASTSLPSPSSCPHTLFRKNPLWRC

SEQ ID NO: 962 - protein, 56 aa, Homo sapiens
ATMTHPRTATSLDIMTCLQYGIPHHLHFDARTVEEPGWYGRGQHTWLLLLKAGDRA

SEQ ID NO: 963 - protein, 78 aa, Artificial Sequence
  modified Homo sapiens FSP
AQGSVMISSPASSQRWPPPRWMSSEVTRLWSSSGAGKSETCGSCARSISGRQSPSPAACWMAWLRHRLRAGAGCGQVP

SEQ ID NO: 964 - protein, 59 aa, Homo sapiens
NMREFILGRNRTDVMNVVRTSLEIQTWQIITESILERNRTDEMCVVRSLVIIHTLHSMR

SEQ ID NO: 965 - protein, 34 aa, Homo sapiens
LEIRQLSSKSLWRVGPKTRVLNSSKPPLSQIPLR

SEQ ID NO: 966 - protein, 24 aa, Homo sapiens
LWTIRNYLLHKLLKLFRIYNSGDF

SEQ ID NO: 967 - protein, 23 aa, Homo sapiens
SQGSQNFALTKHHWLILESICAK

SEQ ID NO: 968 - protein, 59 aa, Homo sapiens
HPTTWNACPWGQLPTGEQIRPGRHPPLRPQRPSPRPRLLTMPTGLQSRLFSAEKTPLPL

SEQ ID NO: 969 - protein, 24 aa, Homo sapiens
NSPFGSSCLQTSNNNMEKVTLKKV

SEQ ID NO: 970 - protein, 34 aa, Homo sapiens
ISFRVLASSWYASLPSPSCNLWMPSTKIRLFTAI

SEQ ID NO: 971 - protein, 27 aa, Homo sapiens
SLFLPGSTPSLHFLCWSLRSSGGCRSA

SEQ ID NO: 972 - protein, 30 aa, Homo sapiens
LESLPAFLRCHLKTEVPCGLWLRSMGEIAS

SEQ ID NO: 973 - protein, 38 aa, Homo sapiens
VGELCGGSEPQTQSWCVQLGVGMGLKKPSCWCWTLMWT

SEQ ID NO: 974 - protein, 35 aa, Homo sapiens
RRRTPTAMGRNHSCTSRSPSSSWMSSESWRSRTCR

SEQ ID NO: 975 - protein, 30 aa, Artificial Sequence
  modified Homo sapiens FSP
HWSPSPLHHHAHCLPTPEWPRAWVLQQYPH

SEQ ID NO: 976 - protein, 20 aa, Homo sapiens
HHHRRAPGQGSATASPARCT

SEQ ID NO: 977 - protein, 29 aa, Homo sapiens
WSRSWRSSRCPCCGWSTTARPACSMRLTS

SEQ ID NO: 978 - protein, 19 aa, Homo sapiens
NGNPVQESPQHQMIQDAQG

SEQ ID NO: 979 - protein, 22 aa, Homo sapiens
CPMMNFLRYYLRLKIPLGCNLT

SEQ ID NO: 980 - protein, 26 aa, Homo sapiens
LTKLMVWLQYGQAGKIRFTVLLFPPC

SEQ ID NO: 981 - protein, 20 aa, Artificial Sequence
  modified Homo sapiens FSP
ASTSSVTASCASTTSRGMWN

SEQ ID NO: 982 - protein, 27 aa, Homo sapiens
LARSSLSLEANSPYLGVWRPPLRMGLW

SEQ ID NO: 983 - protein, 27 aa, Homo sapiens
LGGGCITLAHVCQAWPVYGLHLTDLFV

SEQ ID NO: 984 - protein, 18 aa, Homo sapiens
LSRNSTLLIEENLHHSKN

SEQ ID NO: 985 - protein, 14 aa, Homo sapiens
NTGPRKNRSGKKWK

SEQ ID NO: 986 - protein, 11 aa, Homo sapiens
PPVWSRCGRRC

SEQ ID NO: 987 - protein, 15 aa, Homo sapiens
LSLPETALKQYACTV

SEQ ID NO: 988 - protein, 21 aa, Homo sapiens
QLDLLLPSEYYMFPAWGSVFW

SEQ ID NO: 989 - protein, 13 aa, Homo sapiens
SMKKIESWTSLHP

SEQ ID NO: 990 - protein, 10 aa, Homo sapiens
SLFRETQSNR

SEQ ID NO: 991 - protein, 21 aa, Homo sapiens
LTSSCGSWIAYCCCFKGKSVL

SEQ ID NO: 992 - protein, 13 aa, Homo sapiens
PFLPIQKAASGRG

SEQ ID NO: 993 - protein, 13 aa, Homo sapiens
SDAPLEALTGQGM

SEQ ID NO: 994 - protein, 10 aa, Homo sapiens
KKKKRTRIIM

SEQ ID NO: 995 - protein, 10 aa, Homo sapiens
RMKKVIIKWA

SEQ ID NO: 996 - protein, 11 aa, Homo sapiens
INEKRLTCSIL

SEQ ID NO: 997 - protein, 19 aa, Homo sapiens
ATSTPGRLSSSPRCPGNGG

SEQ ID NO: 998 - protein, 15 aa, Homo sapiens
NVGRPLDTVQPLKCI

SEQ ID NO: 999 - protein, 10 aa, Homo sapiens
DEKKREKVIS

SEQ ID NO: 1000 - protein, 11 aa, Homo sapiens
SNKKWKKMKRS

SEQ ID NO: 1001 - protein, 8 aa, Homo sapiens
TMKKIVMY

SEQ ID NO: 1002 - protein, 21 aa, Homo sapiens
GGGTQDSVWQACRKSQVPLLS

SEQ ID NO: 1003 - protein, 12 aa, Homo sapiens
FSPPPAACSPAK

SEQ ID NO: 1004 - protein, 10 aa, Homo sapiens
TVQKMQNTCV

SEQ ID NO: 1005 - protein, 11 aa, Homo sapiens
NPKKDQLLKDF

SEQ ID NO: 1006 - protein, 10 aa, Homo sapiens
RMGGSQLSRI

SEQ ID NO: 1007 - protein, 11 aa, Homo sapiens
TNKKQLMRKKS

SEQ ID NO: 1008 - protein, 11 aa, Homo sapiens
ELKKITVNYLQ

SEQ ID NO: 1009 - protein, 13 aa, Homo sapiens
FIEKNSKMTQIIQ

SEQ ID NO: 1010 - protein, 10 aa, Homo sapiens
EAKEVFPKML

SEQ ID NO: 1011 - protein, 10 aa, Homo sapiens
RVLATHPQAT

SEQ ID NO: 1012 - protein, 8 aa, Homo sapiens
AAGGTGRR

SEQ ID NO: 1013 - protein, 10 aa, Homo sapiens
AQPGSGLETC

SEQ ID NO: 1014 - protein, 13 aa, Homo sapiens
KGKKAIQRQSQMR

SEQ ID NO: 1015 - protein, 37 aa, Artificial Sequence
  modified Homo sapiens FSP
CWSPLQPRARQRQTRCQVRPPPGPPCLPLAKRSRSPR

SEQ ID NO: 1016 - protein, 34 aa, Homo sapiens
RRSCLPHQLHPWGPSCLLCLGTIVPLPCAPSSPG

SEQ ID NO: 1017 - protein, 10 aa, Homo sapiens
PGALLNPSRG

SEQ ID NO: 1018 - protein, 13 aa, Homo sapiens
CHPHHPQVPHHPL

SEQ ID NO: 1019 - protein, 11 aa, Homo sapiens
LGLNMKRNSKP

SEQ ID NO: 1020 - protein, 11 aa, Homo sapiens
EPKKSLIPLSG

SEQ ID NO: 1021 - protein, 9 aa, Homo sapiens
GWHWAFRKE

SEQ ID NO: 1022 - protein, 49 aa, Homo sapiens
GKTSTPLTSISPRWPSLLTCSWLGWHWAFRKGSPRRCWACVQAQRWCGW

SEQ ID NO: 1023 - protein, 10 aa, Homo sapiens
VNFVKILMIQ

SEQ ID NO: 1024 - protein, 38 aa, Artificial Sequence
  modified Homo sapiens FSP
GSGSAPCRRVRGPASPMGMRRRAQPSASTRRCSACSTS

SEQ ID NO: 1025 - protein, 42 aa, Homo sapiens
ALSVYQFFIPQREVKISTIILPSNKPFKPLTKRILVLLGSIK

SEQ ID NO: 1026 - protein, 34 aa, Homo sapiens
ARPARPCPTGHSLVQMEPLTTARPTSSSTTCPRT

SEQ ID NO: 1027 - protein, 18 aa, Homo sapiens
ATRMPEPHRALPTRVPFP

SEQ ID NO: 1028 - protein, 11 aa, Homo sapiens
SLVMKGQIPVR

SEQ ID NO: 1029 - protein, 10 aa, Homo sapiens
YYKYVTNACL

SEQ ID NO: 1030 - protein, 10 aa, Homo sapiens
SLPPAPLLHE

SEQ ID NO: 1031 - protein, 24 aa, Homo sapiens
ILTMRQWLKNRSLERTHLLIIQNI

SEQ ID NO: 1032 - protein, 14 aa, Homo sapiens
TPWSTTRPTTPWLT

SEQ ID NO: 1033 - protein, 11 aa, Homo sapiens
LTIKITSTFIS

SEQ ID NO: 1034 - protein, 15 aa, Homo sapiens
RRPCTHSGSTTRSHS

SEQ ID NO: 1035 - protein, 10 aa, Homo sapiens
VIEKNLMVGG

SEQ ID NO: 1036 - protein, 10 aa, Homo sapiens
TAEKRIKMST

SEQ ID NO: 1037 - protein, 55 aa, Homo sapiens
TPMDSHRSSQDKTLTHPSMETTRRRVPHPTMTTRTSLPPTGMTRASDRPSSARCS

SEQ ID NO: 1038 - protein, 42 aa, Homo sapiens
LSTVTTHWSSGWTLCWALPKRASNWTSRTSRQWAPPWTSCGS

SEQ ID NO: 1039 - protein, 39 aa, Artificial Sequence
  modified Homo sapiens FSP
LPQPCGPASCSTPSWPMAVPTSRSCMARSPRPSACQLPR

SEQ ID NO: 1040 - protein, 28 aa, Homo sapiens
VVNLGHSCCLDPETRLLRCGMSVLACAL

SEQ ID NO: 1041 - protein, 23 aa, Homo sapiens
LLHFLEKSPLEEWNQWVMHLCWH

SEQ ID NO: 1042 - protein, 26 aa, Artificial Sequence
  modified Homo sapiens FSP
RISLFLGSHPFRARILCLTPCKPRSS

SEQ ID NO: 1043 - protein, 17 aa, Homo sapiens
NLWLIVLTQLVLNLVQE

SEQ ID NO: 1044 - protein, 16 aa, Homo sapiens
PTTQHMTTSAGSLSPT

SEQ ID NO: 1045 - protein, 16 aa, Homo sapiens
LLKRTIQMPPASPASS

SEQ ID NO: 1046 - protein, 13 aa, Homo sapiens
RERFLSNRMKWKY

SEQ ID NO: 1047 - protein, 11 aa, Homo sapiens
KPIFLNRYLLQ

SEQ ID NO: 1048 - protein, 10 aa, Homo sapiens
HNPFLASCRW

SEQ ID NO: 1049 - protein, 10 aa, Homo sapiens
QCPSCMPSGT

SEQ ID NO: 1050 - protein, 9 aa, Homo sapiens
ETAPHLHLL

SEQ ID NO: 1051 - protein, 58 aa, Homo sapiens
PQWCGWVRYEGPRAEPWAKEHPLVLTLQPQAGTLYIFTDKSKNLYSLCGSTLVSLQVS

SEQ ID NO: 1052 - protein, 74 aa, Homo sapiens
CSQRRWIHLMRYATAFLCNSVDNMISQCLQFECFLKCRKLVLTPMPLLMVIIIRLFWKVPGLQEVVVAIFFGQK

SEQ ID NO: 1053 - protein, 53 aa, Artificial Sequence
  modified Homo sapiens FSP
RGAALAISMGVRVMWASFKHSTLALAVCHIISRITLGLSLQGVLSTNSSKSSS

SEQ ID NO: 1054 - protein, 84 aa, Artificial Sequence
  modified Homo sapiens FSP
RRSCPTLRACANSWSTWLSLWSHRPPPGASSGWAGPAATSSLEASGMPPSSPSMASLCWSTVAQTPSPVSGSWCGTWTAWMPCW

SEQ ID NO: 1055 - protein, 54 aa, Homo sapiens
EKSVKEIKCFLTMNLNIAKVLLKTKVYFMYLTSLSKNPKIFMHRNLKQKWHLGI

SEQ ID NO: 1056 - protein, 51 aa, Homo sapiens
RRKSWKMKSPVDTVLSKENQICKVKTILAPAPHALSLPRPQPFFRAIDKDR

SEQ ID NO: 1057 - protein, 41 aa, Homo sapiens
SRLSPPEAAFQRMLAMELRSPDHPRAEYPDFSPSPGPVAGL

SEQ ID NO: 1058 - protein, 38 aa, Homo sapiens
PRPLPGLPAPPQRSSWMGSSCSSCGTRPMSSWLCAWGE

SEQ ID NO: 1059 - protein, 15 aa, Homo sapiens
SWMGSSCSCGTRPMS

SEQ ID NO: 1060 - protein, 34 aa, Homo sapiens
NWILVNLFSGTSKAPFLCGGIDQTSQPSAGPRGT

SEQ ID NO: 1061 - protein, 28 aa, Homo sapiens
VGRSGWGVPASCTAAPPTSRWMSWQDCS

SEQ ID NO: 1062 - protein, 30 aa, Homo sapiens
SAGVLRGSKRTGPACMPTKRRTVMKSTWRS

SEQ ID NO: 1063 - protein, 25 aa, Homo sapiens
IWWIVQNSFLLPFRMSSFPKKFFFL

SEQ ID NO: 1064 - protein, 24 aa, Homo sapiens
ANSKLSSSLLLRKHSCGQKHLTSC

SEQ ID NO: 1065 - protein, 21 aa, Homo sapiens
ISSWQVLFMNIQEDILSLLSQ

SEQ ID NO: 1066 - protein, 17 aa, Homo sapiens
LEWQALDYSRSWLWTDT

SEQ ID NO: 1067 - protein, 12 aa, Homo sapiens
LLRQGKCQSAWS

SEQ ID NO: 1068 - protein, 83 aa, Homo sapiens
PRSYMPTLCAASTMPWQKTFPSNHWCRWQPGALGSMGTSCWQGTARRLSPFRWTKRKCWHCWKRCCSPTCPCQPLEDMPSQPS

SEQ ID NO: 1069 - protein, 46 aa, Homo sapiens
QLALKHQLRHPLHPPHLVPKLQRRQFLAKQGQWGPPRAREKLTSSQ

SEQ ID NO: 1070 - protein, 61 aa, Homo sapiens
HPVRPPPPNVRAWVGQQPPMPLGRPLGLEGQGARLIPPVSLKGFWDPRPTGKGLEGGRHRT

SEQ ID NO: 1071 - protein, 42 aa, Homo sapiens
ASPRRPRRALRGPVRARTPRGSSSMRSLSMTSLHSALTQSLS

SEQ ID NO: 1072 - protein, 57 aa, Homo sapiens
EAPSTRAAPPSLRAARAHQRTGRQHPPPAKHSSSQCTQGRRWGAWHPGSWPVAQRMG

SEQ ID NO: 1073 - protein, 30 aa, Homo sapiens
RPWNSSTRGCCRPVGRPRPRGGWVWWAPRA

SEQ ID NO: 1074 - protein, 25 aa, Homo sapiens
LTPVEKLRRKISELLLGNNMQPNSI

SEQ ID NO: 1075 - protein, 22 aa, Homo sapiens
LAPPDWPGIWMDSCRRPAPQDC

SEQ ID NO: 1076 - protein, 25 aa, Artificial Sequence
  modified Homo sapiens FSP
RPCSSCWGLVLPTCLLASWQPGGCR

SEQ ID NO: 1077 - protein, 24 aa, Homo sapiens
ATPVANVSAGAPTSIATSLFTIPS

SEQ ID NO: 1078 - protein, 17 aa, Homo sapiens
RPASSWCSPSRSVPSAS

SEQ ID NO: 1079 - protein, 19 aa, Homo sapiens
RSIFRGHRSWDLPIIVNLS

SEQ ID NO: 1080 - protein, 10 aa, Homo sapiens
ESEKNWWKNL

SEQ ID NO: 1081 - protein, 14 aa, Homo sapiens
DITITLELRTIWIV

SEQ ID NO: 1082 - protein, 11 aa, Homo sapiens
PQPPGCCPWPA

SEQ ID NO: 1083 - protein, 13 aa, Homo sapiens
RSFFPKSSPLFRM

SEQ ID NO: 1084 - protein, 13 aa, Homo sapiens
LLGGCSGLPWPRR

SEQ ID NO: 1085 - protein, 9 aa, Homo sapiens
RCPPRWSPC

SEQ ID NO: 1086 - protein, 8 aa, Homo sapiens
TLRFLHLS

SEQ ID NO: 1087 - protein, 83 aa, Homo sapiens
HPQVCPLRGSQLQRTEQGEDHPLHPLSRQHRALVVGELGPQAWPQLLLEPNSGKSASRRRPQGGPQPPKLRVVEAEVGDSWKR

SEQ ID NO: 1088 - protein, 1507 aa, Artificial Sequence
  Assembled poly-FSP polypeptide 1A
TEIQLTMNDSKHKLESPALKQVSPASPPTQQPQTPQDSRQVLALAKKTLTNASRAGQFPVWRRTSRGMSLQWKSGNACTPLRCPSRSPATFLTALNGWHRSGLRAQMPSSWSSSGRTLKLAPLQVTTTLKLILVMLEIVTERSLLYSRMCLVQIPTHTWEPDYFVSLPMMFSWATQSFPVGAVFLTRPAIPCCSCTSHSNPWSQSNQQLKWTPHILKSASFDKKGFVILSRRSKIEASPIGSIASSPGHPLGPTLAIRFISAPQPSSSTVTAAPSGQYFIAKKRIKLRRNNMGGNRSICLTRKRKREKRSQKSRQNHLQLKSCRRKISNWSKLRSPWIFTKCEICVKNTAILAITLITPQDPHLDPVCHPHRRPGWKGHHRVVFSHHPSGSTKSHWQQRERGGGRREKKGCREQRKVVKNPSQPVPLRNDGITNGNDSTRSCSISLKKSLEKMPLMRRARPTSCSTCRMWWKGKKRRKEIVPMSLACSITVSFVGQISTLVLDVSSISHWRLPCKVTESSSSFFYTSDRTPLSISRPTSRARQSCCLPGLTHPAHQPLGSMSTRREMPSQATPSPPGPWRAALGKEVKRSQSKLRLRNTSPGEKNDLQLFVMSDTTYKIYWTVILLNPCGNLHLKTTSLQRPPRSILSLNGIWEVMPRTLEGCISVKDHRTSQNHSKCITECVRTALNVSKKRLPKLMKKKDSTIFINKVRQNFKRNFKKKKPLTFSPSRRMTRRTMTTTKMMMMRRTKRRRRKRRRMTMMTRRTLLTKKTCLTPRTSAATKALPRQTISQRRPIQTPPGTSLAIWGRTRLTLTGTRSSGTRASPSAVCLCCWTCPSRSFPAASPSGLRAPVGAQAPPEVTLRASCASSASKACAGLWPWGAQVRVGAGTGGGPACVPVAEASTGAWTAEGAAGTRCRASRAPCRQLPASSPTKCEICVKRRRRRKRSSQSRSPVPKKRERMMLPVRARTARSALPQGRAPLEGMLLPRALPSLLSRMPARRESRFWLALQALGLRPPHLPSCHPLPQLLGPPPPHQAPMTLKALVKTWTQFRNYPRADKKNVRSTAFFLLDIILGDCPRTMAGPSASLHPASGRASRKTWQRRLRACRAGGPAGWARQAYPRLKTFGVPLGSILCLAGSLSTMMIISTTRQECGRRASVPCRPMIGSARPGPWRTSAMPSAMGVALPTSCESGRSPPATGGRMPGSQSIMMSWMPPLAPCAACPCSPAPTLCPAHPARAPTAVPAFTPLSAHPVPVLSGCHLAVRTSMLTLLPMEAKKSMKRSNAKKMEDMIWESRLPLRPQRGPRPLHRWLQQTTGCSQRRIVFFLAPYFPRHPHRSPPTSCPPLLEAFPLPRASLRATVPRHSSVLATGLHLHRQISLPLRGFLLHQPLPGQHLWLSHRLRLRLPRTQPSLPGPCASLLSTLSQPPPQAPSQVWTAATLRCPAVPAAACPPALRSMPKSRNQVLFRRNLTPSQLRTLAPPYMLLPQSLSQSLSRKQIPSQSMLV

SEQ ID NO: 1089 - protein, 1501 aa, Artificial Sequence
  Assembled poly-FSP polypeptide 2A
RKMQSLNHPSRLTNGSPPLHLCQPLRMSRTPPRRVCAAPPHRLLGPSRWNPRRKTWKMRKKYAQKPSQKNHLYGGKKRSKFSRSHLDFSPYWMKKVKVLFKADQSESSLSSGRCSLMEQIPHLKSRRKWQIRHVLKNLWLPMRSLGEPWRAGFQWGESPWQVMASLTGRATFLLALWECSLPQARLCLIVSRTLLLVQSRNKKTKLWFSLINIHHRKNPLLPMRWWCTRGGGKRKKKMCKVSGGCTACVERCPWKGICWKWPVTVAAIRMCALSHPSFYISSTVCFLSKHCMTACTRKRMKTGAIQEKGAIQEKGAMTKRICVVNFEACREMESLSAPEKITLFEAHMARCTSINVLCVRASLIEKLMKEKRKMKRNQVASPQIMQRLFIKGYQNNHFTFHLQNFAFFSSFGNNKYINILTILFHVRNIVYGIQVMLCASPQIMQRTSADRFRMKRRMQNLDNLGVPWPLLPGIPSLNAQWMFLRIASPQIMQRMSAVNFETIRARNRNMKKTMSHLIAHQALKMSGLRLFHPRLLTRKKPGKLLLAHMYGFSTYGTQKGECVCLQCLSGSSLFILKQPLDLKISKTFMGHREGSESDNLGLLYSFPPPYPISEGLTMTTGRNINSNSLMTNCLFSPIFLCHHAIMHRKMTSPHFRLFSSKIPHPQVPSVVALCKFRAFIHTPRSPGCSVYANMCWPKFFLTFSQQWSSVTSLEWTAQERGCSSWLMKQTWMKSWSLRDPSYRSILEYVSTRVLWMPTSTVLQAHPQVPALAPQAWWPARRGPLTSAPSAQQSLTREKIINPTISCPFQSPTKRLIYPPSTCSLPCRGFLPSRFPWGPPPLNSVIVHKIVLVFLKSLSSYNCERRISGIQKRAIEFAVLKLLNMDLPLENTQIPRTSPLWKITMVLTYPNCVVHVLMFGALRATAPATAAPQAQTPHWRAATTSSMSSSPRAEPTSSSSWATCWPRCCSSSCYWSLSSWPPAGAAEATNTRTRSRESQRGRMLTWRSSLWLQGTRCFTGVRTSSRYKKRGVIAWRRQINRRKLQRKKHWNSAYLGRTLLVTCILYHRWIVTSMCQSQRWLTSTTSRSSALMWTELSLEPWIPYLHQQKTQRTLESAGLFPWLHTQCQEKKSRKLMSSCTHPCTMLLPQGCHPAWLSPISACPRLLPYPFHVLALEVTFPPGTAMPQMQLQALAMWEKGWDKPGTSLQCYLNRRRNSRKQSQVQLAIQVLLVDKHKYFLFGQKKGHMIFSLANGLWFNLIFNSRKKLLEDMKQNGFTGKGLTHPVPLKRTLQNKRNKNIKRVNQKKGNIKRKSILLHLIVLNSPESNLILIQHGGIFTFRFWVEKLSWNICKNLSLYLDKFVQRLLYVYIIETNVFVLNLFHVPVNQIFMMAFYLKYTEKAWVMELEWLIQQQCYQGSCGRACSCGRGCGTPRGDWKRHPPRRAFWKPPSQGISSCLMTGCWLEKKATWMRRTRRKKREDHCGLRHPSWPWTRCLRMRPPRS

SEQ ID NO: 1090 - protein, 1506 aa, Artificial Sequence
  Assembled poly-FSP polypeptide 3A
GAAAASCQSPPSPRETTPSSDATRRTRPIAAQSKKTMTAAGLTPMIRKIQKRRRTANRCLRVRCGGWLCGWTPRGQNTRSTNLEKNPSLKKQSQRRGKLSSLFFSHCLCRNSRRATPTSKGSLRRKYLRVPIPPHLRHPLLLMDLDGMLTVIGQGLVGMTPRDLGTVAGATAQIQRPIQVQTGGRLTPPPLILWPQAAPVDPPGSVWILPCKNKKRRKLRPKRLDFHPRSSSGVSVITMKLWEKHFKGLNWNLVVWILNLKMMNIEITPQRSKARKSGVMKCWDLCPSEKKRKLPLPLTFSTLLWDSRHRGASSSTSRDSRSFFTSAHPSRPCRMRLYQFLIHLRKVDTHHLQVVTKTVTATTADGQRMRRLKCKACRLRWARPEPAAQAPPKSHFPPHPSGPSRTSSLQLRSIPHVPKATAAHSVTVKLQKGKNSPCCQKKLRVQNQGHLLMILLHNTYMEMHYGHQAPQVAMLPKLLCRQMLPTLSTLQQRHPQGPCPPPVTPLRVQSVLLLGVPQTAARQPSRPTGRTPTTRLMAPVGSVMSCSLLTQPSPASACTMPPLLHPQWAPHSAGLSPGACRPACTCISMTTISRATWQVSVYSGNLLSFSRRGMKSSVRLKNSRRNRRYRKIYGELKMSLQAVAPRCPRSAVDISPGPTSPSLASCASVAIGKLALLGASAPCGAAGAREAGRFAVLGTMVMKHLNRKLHLTRSCLIDLTMMMSQKLWKNQRKRIPLPSPRQHLLPQYPLHPPPPCLLLLHHRHHLAFLEMACSSQHTHSIKIWISFSHEQSSPFLARSWNTMQWNNKKMAMTVIAGAHHCQYKLTYTKVWKMNWKKMMIGSQHLLFSPLDSSPLQLLLHPHGKRCNPCCRLTWMSMLQKQCCYNLVIKHPLIFRINLRRQGKTKDGVVQSLGFLNQQIILQKEFFICLLMFIKRWKPAATKREWEKRKQILGGGGKYKEYFLKRILIRKAMTVLAGDKKGLGRFMRCVQSETKAVSLQLPLGRGPVYYVCNRMNVSSVLKPFLFTVPIEDMRECTLGRNRMNVSSVLKPCLIPVPIDLPRMLPISSPLHRPQMPFWTCTFPATTWGTWETPSTWGWRTFRGPRRKVLMVLWLPANQSLQKSQVFQWVLRTENIRKLIWTKQRSFLSLFPKLRATEQMTNVGCAFSGRILHQPEMAAMRLMPKFLNSTNSWWTCTNLSVPMMLTILIWKRVFILLLSDKKLLKKSSQLRRSWRNVSRISHQMKCLTAVDCLQAFWDMNMEHRLTMDSALSLTKREGPETCKKKLLLKLLTMSLSNILMKFRLRLRIPSLRKYRQHLKKTSAKGEKLKHCFKAWGRGPPLHTRSQKKDPAGKLKKLTTLSFVLIEERRNLQRNLKVLWLKKSTKSRYLFFLTVCGFFEKKRPEWLSSRKKGHTKNRRKAKRKPQIVHKKRGLFLKKKYLVQGAKKITFLSNGMEACGTHPTPRLSDRVFLVKITTTTSSPRRSPALRARGGTTIGEVTSLCFFYLLY

SEQ ID NO: 1091 - protein, 1507 aa, Artificial Sequence
  Assembled poly-FSP polypeptide 4A
IQKKKQKSMAKKSQQPLVLKKNRKQEWGGQAHRQRNNAKKMPFQEEKKNGRISSSLILSFQRVKDSKKMTQKMCSSLALPTGLTSLILPSSDLAVLISSSTSHFLMRSPVLPSSRLTCASPQLPRMWTWSSWLKHPRTASITLPTTSLKGSRTSCCPRSHPRLPRTKWPLQCLLHSLGTTGTLVWERGVLQMRSLEAHCPLQTFHLHHCRTQPSSCPPAWILYQGQWSGAVVGLRPVAHHLPRPIQGLHCPQAPHQPALSWGKWPVGMTGPARCCRWPRRSQKSQHHCALRKIEWATKLSLGGKAGPQAQEKARPSPCLSWSSRIVAPGHALSCRTRRRWSSKCRGGPSASDRCCSCSPSGFSAGRGRCPVQGCLRPHRVQLLRRWGPGSPAGQRLSKGFQLLRWWGPGSPAPEPRKGPFPPPDPPWPVTAVTVMAGSVPSAQSVDALESPGPLALEGPSSPRNLLWREMSIFLPGIFCQKKVPSASPWGLVPPSPPLALGPRMQLCTQLARFFPITPPVWHILGPQRHTPQVVLRLGNLPPFFRGSEVPFPRPCRTKNEGNNHWPRVEMPTGWLLVGYNTRNTAQNPRLQQHLKHWQQCTRARWCQEPCQTLTFFHFFFFFKTVSLCCPGWSKGQPPPPGLKPSSLASQVARTTGVYQHVWLICFVFFVCVETGFCHVAQVGLERLVSLSGITDVNHWAQPKPSPSKGTGMNRPIGLRVGKGVWARLLKKKPRDICRISNRKTRKAAREKHRKTDRASVSFWTLLPTTGVRTRGSPLRLTLWPPRCRCRREYRVTMNILNSLPSSMEIAVLQETAKKSPTSFCCNLDLQHQRRRKKKKDKVEIRNRSPKANSTECQGEHSREQNLLNLVQLNPHSPHHRKDEEDHQKRHHHHNQKKMSVPLFFHGDLCRESTLGNFWMKLLQLPQRPPLQPVTGMEILLWILLKMEIQIFKICLGEMQLCTSRILNLQVLKKILRSFMKLYHSLVMCLRLRTKLEKALSALFIWPQHSYKITHPFASQPLGQEMPNNTQIRLLKPDKKKKSTEKTKGQAFGSFSADFSAPQGQAFGSLCQLVSADFSAPQVTRLRSLNHLLIWLKNWKRFKLKKKYQAPLRLWSWCGTSQTYFGSIICIKNMFLQRKGFLNLSHVEKFELKKNLLLPVVINLKRLQKFMLNQKCLAPFPACTSKAWTPRKLVGRAVRRKGILAMTLTLNGIEALTALFTCRTASISVNISTLMSILEAIIKKMKKRIMVHRWIFSNQLTVQMLCLPLLTPDTRWIFSNQLQTVQMLCLPPLKQGERIIWPLGGFQIPNFFWSLGIGHTGAWWHTGRRRREWGGSTVSRSPLWISSMIYLRGMAFASDSSIRTTRVSWCRRCGAKSAAASSSPLWDCSTTTGTHHGCLWEIPSVTLLANLHLCYYHSQSNRNKSRQMESLGMKLQLKKKVNACSTYTPHICRHTCRVNAVEELHSRRMSVRIVKNWVSCCYVRLSAVGLSTWSALDNKIICKGHRIT

SEQ ID NO: 1092 - protein, 1507 aa, Artificial Sequence
  Assembled poly-FSP polypeptide 1B
TEIQLTMNDSKHKLESPALKQVSPASPPTQQPQTPQDSRQVLAMPSSWSSSGRTQRKVVKNPSQPVPLRNDGITNGNDSTRSCSISLKKSLEKMPLMMKKKDSTIFIVPMSLACSITVSFVGQISTLVLDVSSISHWNKVRQNFKRNADKKNVRSGEKNDLQLFVMSDTTYKIYWTVILLNPCGNLHLKTTSLGDCPRTMAGPSASLHPASGRASRKTWQRRLRACRAGGPAGWARQAFDKKGFVILSVGAGTGGGPACVPVAEASTGAWTAEGAAGTRCRASRAPCRQLPASSPTKCEICVKRRRRRKRSSQSRSPVPKKRERMMLPVRARTARSALPQGRAPLEGMLLPRALPSLLSRMPARRESRFWLALQALGLRPPHLPSCHPLPQLLGPPPPHQAPTAFFLLDIILRLPCKVTESSNMGGNRSICLTNAKKMEDMIWESTPLSISRPTSRARQSCCLPGLTHPAHQPLGSMTLAIRFISAPQPSSSTVTAAPSGQYFKGKKRRKEIFKKKKPLTFSPSLAKKTLTNSSFFYTSDREAKKSMKRSMTLKALVKTWTQFRNYPRASSPGHPLGPNGIWEVMPRTLEGCISVKDHRTSQNHSKCITECVRTALNRRSKIEASPIGSIALRSMPKSRNQVLFRRNLTPSQLRTLAPPYMLLPQSLSQSLSRKQIPSQSMLVASRAGQFPVWRRTSRGMSLQWKSGNACTPLRCPSRSPATFLTALNGWHRSGLRAQRKRKREKRSQKSRQNHLQLKSCRRKISNWSKLRSPWIFVSKKRLPKLTKCEICVKNTAILAITLITPQDPHLDPVCHPHRRPGWKGHHRVVFSHHPSGSTKSHWQQRERGGGRREKKGCRERSLLYSRMCLVQIPTHTWEPDYFVSLPMMFSWATQSFPVGAVFLTRPAIPCCSCTSHSNPWSQSRHPHRSPPTSCPPLLEAFPLPRASLRATVPRHSSVLATGLHLHRQISLPLRGFLLHQPLPGQHLWLSHRLRLRLPRTQRPPRSILSLRLPLRPQRGPRPLHRWLQQTTGCSQRRYPRLKTFGVPLGSILCLAGSLSTMMIISTTRQECGRRASVPCRPMIGSARPGPWRTSAMPSAMGVALPTSCESGRSPPATGGRMPGSQSIMMSWMPPLAPCAACPCSPAPTLCPAHPARAPTAVPAFTPLSAHPVPVLSGCHLAVRTSMLTLLPMLKLAPLQVTTTLKLILVMLEIVTESTRREMPSQATPSPPGPWRAALGKEVKRSQSKLRLRNTSPIVFFLAPYFPRRMTRRTMTTTKMMMMRRTKRRRRKRRRMTMMTRRTLLTKKTCLTPRTSAATKALPRQTISQRRPIQTPPGTSLAIWGNQQLKWTPHILKSASRRARPTSCSTCRMWWIAKKRIKLRRNRTRLTLTGTRSSGTRASPSAVCLCCWTCPSRSFPAASPSGLRAPVGAQAPPEVTLRASCASSASKACAGLWPWGAQVRQPSLPGPCASLLSTLSQPPPQAPSQVWTAATLRCPAVPAAACPP

SEQ ID NO: 1093 - protein, 1501 aa, Artificial Sequence
  Assembled poly-FSP polypeptide 2B
RKMQSLNHPSRLTNMSRTPPRRVCNPRRKTWKMRKKYAQKPSQKNHLYNSRKKLLEDMKQNGFTGHREGSESDNLGLLYSFPPIRMCALSHPSFYISSTVCFLSKHCMTACTQKKGHMIFSREKIINPTISCPFQSPTKRLELSLEPWIPYLHQQKTQGGKKRSKFPGTSLQCYLNRCSLMEQIPHLKSASPQIMQRTSADRFRMKRRMQNLDNLGVPWPLLPGPLENTQIPRTSPLWKITMVLTYPNCVVHVLMFWLPMRSLGEPWRAGFQWGESPWQVMASLTGPYPISEGLTMTTGRNINSNSLMTNCLFSPIFLCHHAIMHRKMTSPHFRLFSSKIPHPQVPSVVALCKFRATFLLALWECSLPQARLCLIVSRTLLLVQSAAPPHRLLGPSRWSRSHLDFSPYWMKKVKLANGLWFNLIFVLFKADQSESSLSSGRNKKTKLWFSLINIHHRKNPLLPMRIPSLNAQWMFLRILLLAHMYGFSTYGTQKGECVCLQCLSGSSLFILKQPLDLKISKTFMLQAHPQVPALAPQAWWPARRGPLTSAPSAQQSLTASPQIMQRMSAVNFETIIYPPSTCSLPCRGRTLESAGLFPWLHTQCTHPCTMLLPQGWWCTRGGGKRKKKMCKVSGGCTACVERCPWKGICWKWPVTVAAQWSSVTSLEWTAQERGCSSWLMKQTWMKSWSLRDPSYRSILEYVSTRVLWMPTSTVRRRNSRKQSQVQLAIQVLLVDKHKYFLFGRARNRNMKKTMSHLIAHQALKMSGLRLFHPRLLTRKKPGKFLPSRFPWGPPPLCHPAWLSPISACPRLLPYPFHVLALEVTFPPGTAMPQMQLQALAMWEKGWDKRKRMKTGAIQEKGAIQEKGAMTKRICVVNFEACREMESLSAPEKITLFEAHMARCTSINVLCVRASLIEKLMKEKRKMKRNQVASPQIMQRLFIKGYQNNHFTFHLQNFAFFSSFGNNKYINILTRRKKREDHCGLLILIQHGGIFTFRFWVEKLSWNICKNLSLYLDKFVQRLLYVYIIETNVFVLNLFHVPVNQIFMMAFYLKYTEKAWVMELEWLIQQQCYQQEKKSRKLMSSCRAFIHTPRSPGCSVYANMCWAFWKPPSQGISSCLMTGCWGSPPLHLCQPLRRYKKRGVIAWRRRKWQIRHVLKNLILFHVRNIVYGIQVMLCGKGLTHPVPLKRTLQNKRNKNIKRVNQKKGNIKRKSILLHLIVLNSPESNPKFFLTFSQLEKKATWMRRTGALRATAPATAAPQAQTPHWRAATTSSMSSSPRAEPTSSSSWATCWPRCCSSSCYWSLSSWPPAGAAEATNTRTRSRESQRGRMLTWRSSLWLQGTRCFTGVRTSSGSCGRACSCGRGCGTPRGDWKRHPPRRNSVIVHKIVLVFLKSLSSYNCERRISGIQKRAIEFAVLKLLNMDLHWNSAYLGRTLLVTCILYHRWIVTSMCQSQRWLTSTTSRSSALMWTRQINRRKLQRKKRHPSWPWTRCLRMRPPRS

SEQ ID NO: 1094 - protein, 1506 aa, Artificial Sequence
  Assembled poly-FSP polypeptide 3B
GAAAASCQSPPSPRETTPSSDATRRTRPIAAQSKKTMTAAGLTPKNKKRRKLRPKMIRKIQKRRRTANRRNSRRATPTSKGSLRRKYLRVRGPPLHTRNIRKLIWTKQRSFLSLFPKLRATEQMTNVGCSIPHVPKATAAHSVTVKLQLPLTFSTLLWDSRHTMSLSNILMKFRLQSSPFLARSWNTMQWNNKKMAMTVIAGAHHCQYKLTYTKVWKMNWKKMMIGSQHLLFSPLDSSPLQLLLHPHGKRCNPCCRLTWMSQNTRSTNLEKNPSLKKQSQRRGKLSAFSGRILHQPEMAAMRLMPKFLNSTNSWWTLTTLSFVLIEEARQPSRPTGRTPTTRLMAPVGSVMSCSLLTQPSPASACTMPPLLHPQWAPHSAGLSPGACRPACTCISMTTISRATWGPVYYVCNRMNVSSVLKPFLFTVPIEDMRECTLGRNRMNVSSVLKPCLIPVPISEKKRKLPNIEITPQRSKAMLQKQCCYNLVIKHPLIFRINLRRQGKTKDGVVQSLGFLNQQIILQKEFFICLLMFIKRWKPAATKSRKKGHTKNRRKAKRKPQIYLFFLTVCGFHLKKTSAKWLKKSTKSRSNGMEACGTHPTPRLSCLRVRCGGWLCGWTPRGRKSGVMKCWDLCPVHKKRGLFRLDFHPRSSSGKGKNSPCCQKKLRVQNQGHLLMILLHNDRVFLVKIGEKLKHCFKAWGSRRNRRYRKIYGELKMSLQAFLIHLRKVDTHHLQVVTKTVTATTADGQRMRRLKCKACRLRWARPEPAAQAPPKSHFPPHPSGPSRTSSLQLRSLFFSHCLCSQKKDPAGKLKKLLKKSSQLRRSWRNVSRISTPPPLILWPQAAPVSVITMKLWEKHFKGLNWNLVVWILNLKMMTYMEMHYGHQAPQVAMLPKLLCRQMLPTLSTLQQRHPQGPCPPPVTPLRVQSVLLLGVPQTARGPRRKVLMVLWLPANQSLQKSQVFQWVLRTEVAPRCPRSAVDISPGPTSPSLASCASVAIGKLALLGASAPCGAAGAREAGRFAVLGTMVMKLCFFYLLYRLRIPSLRKYRQHLNRKLHLTRSCLIDLTMMMSQKLWKNQRKRIPLPSPRQHLLPQYPLHPPPPCLLLLHHRHHLAFLEMACSSQHTHSIKIWISFSHEVDPPGSVWILPCDLPRMLPISSPLHRPQMPFWTCTFPATTWGTWETPSTWGWRTFRGASSSTSRDSRSFFTSAHPSRPCRMRLYQCKKKLLLKLLTTTTSSPRRSPALRARGGTTIGEVTSCTNLSVPMMLTILIWKRVFILLLSDKKGAKKITFLPIPPHLRHPLLLFEKKRPEWLSMDLDGMLTVIGQGLVGMTPRDLGTVAGATAQIQRPIQVQTGGRLRRNLQRNLKVLQVSVYSGNLLSFSRRGMKSSVRLKNREWEKRKQILGGGGKYKEYFLKRILIRKAMTVLAGDKKGLGRFMRCVQSETKAVSLQLPLGRNMEHRLTMDSALSLTKREGPETLKKKYLVQHQMKCLTAVDCLQAFWDM

SEQ ID NO: 1095 - protein, 1507 aa, Artificial Sequence
  Assembled poly-FSP polypeptide 4B
IQKKKQKSNLDLQHQRRRKKKKDKVEIRNRSPKANSTECQGEHSREQNLLNLVQLNPHSPHHRKDEEDHQKRHHHHNQKKMSVMAKKSQQPLGQAFGSLCQLVSADFSAPQVTRLRSLNHLLINEGNNHWPRVEMPTGWLLVGYNTRNTAQNPRLQQHLKHWQQCTRARWCQEPCQTLTFFHFFFFFKTVSLCCPGWSKGQPPPPGLKPSSLASQVARTTGVYQHVWLICFVFFVCVETGFCHVAQVGLERLVSLSGITDVNHWAQPKPSPSKGTGMNRPIGLRVGKGVWARLRASVSFWTLLPTTGVRTRGSPLRLTLWPPRNILNSLPSSMEIAVLQENRKTRKAAREKHRKTDNLHLCYYHSQSNRNKSRQMESLGMKLQSPLWDCSTTTGTHHGCLWEIPSVTLLACRVNAVEELHSRRMSVRIVKNWVSCCYVRLSAVGLSTWSALDVVINLKRLQKFSQKSQHHCALRKIEWATKLSLGGKAGPQAQEKANAKKMPFQRWIFSNQLTVQMLCLPIEALTALFTCRTASISVNISTLMSILEAPLFFHGDLCEEKKNGRISSQAPLRLWSWCGTSQTYFGSTAKKSPTSFCCEWGGQAHRQRNTGMEILLWILLKMEIQIFKICLGEMQLCTYTPHICRHTCRGGPSASDRCCSCSPSGFSAGRGRCPVQGCLRPHRVQLLRRWGPGSPAGQRLSKGFQLLRWWGPGSPAPEPRKGPFPPPDPPWPVTAVTVMAGSVPSAQSVDALESPGPLALEGPSSPRNLLWREMSIFLPGIFTSRILNLQVLKKILRSFMKLYHSLVMCLRLRTKLEKALSALFIWPQHSYKQRPPLQPVQVVLRLGNLPPFFRGSEVPFPRPCRTKMLNQKCLAPFITHPFASQPLGQEMPNNTQIRLLKPLLTPDTRWIFSNQLQTVQMLCLPPLKQGERIIWPLGGFQIPNFFWSLGIGHTGAWWHTGRRRREWGGSTVSRSPLWISSMIYLRGMAFASDSSIRTTRVSWCRRCGAKSAAASSLKKKPRDICRISDSKKMTQKRESTLGNFWMKLLQLPDKKKKSTEKTKIIKKMKKRIMVHMCSSLALPTGLTSLILPSSDLAVLISSSTSHFLMRSPVLPSSRLTCASPQLPRMWTWSSWLKWLKNWKRFKLKKKYILAMTLTLNGHPRTASITLPTTSLKGSRTSCCPRSHPRLPRTKWPLQCLLHSLGTTGTLVWERGVLQMRSLEAHCPLQTFHLHHCRTQPSSCPPAWILYQGQWSGAVVGLRPVAHHLPRPIQGLHCPQAPHQPALSWGKWPVGMTGPARCCRWPRRELKKNLLLPCRCRREYRVTMGQAFGSFSADFSAPQVLKKNRKQNKIICKGHRITSLILSFQRVKLKKKVNACSPACTSKAWTPRKLVGRAVRRKGIICIKNMFLQRKGFLNLSHVEKFVPPSPPLALGPRMQLCTQLARFFPITPPVWHILGPQRHTPCQKKVPSASPWGLRPSPCLSWSSRIVAPGHALSCRTRRRWSSK

SEQ ID NO: 1096 - DNA, 4521 bp, Artificial Sequence
  polynucleotide 1A
accgagatccagctgaccatgaacgacagcaagcacaagctggaaagccccgctctgaaacaggtgtcaccagcctctccacctactcagcagcctcagacacctcaggattctagacaggtgctggccctggccaagaaaaccctgacaaatgcctccagagccggacagtttcctgtgtggcggagaacaagcagaggcatgagcctgcagtggaagtccggcaatgcctgcacacctctgagatgccctagcagaagccctgccacattcctgacagccctgaatggctggcacagatctggcctgagagcccagatgcctagctcttggtctagcagcggcagaacactgaagctggcccctctgcaagtgaccaccactctgaagctgatcctggtcatgctggaaatcgtgaccgagcgctccctgctgtactccagaatgtgtctggtgcagatccccacacacacctgggagcccgattacttcgtgtccctgcctatgatgttcagctgggccacacagtcttttcccgtgggcgccgtgtttctgaccagacctgccattccttgctgcagctgtaccagccacagcaacccttggagccagagcaatcagcagctgaagtggacccctcacatcctgaagtccgccagcttcgacaagaaaggcttcgtgatcctgagccggcggagcaagattgaggcctctcctatcggctctatcgccagctctcctggacatcctctgggacctacactggccatcagattcatcagcgcccctcagcctagcagctctacagtgacagctgcccctagcggccagtactttatcgccaagaagcggatcaagctgcggcggaacaatatgggcggcaacagatccatctgcctgaccagaaagcgcaagagagagaagcggagccagaagtccaggcagaaccatctgcagctgaaaagctgcagacggaagatcagcaactggtccaagctgagaagcccctggatcttcaccaagtgcgagatctgcgtgaagaacaccgccatcctggctatcaccctgatcacccctcaggaccctcatctggaccctgtgtgtcaccctcatagaaggcctggatggaagggccaccatagagtggtgttctctcaccatcctagcggcagcacaaagagccactggcagcaaagagaacgcggaggcggcagacgcgagaagaagggatgtagagaacagcggaaggtggtcaagaacccctctcagcccgtgcctctgagaaacgatggcatcaccaacggcaacgactccaccagaagctgctccatcagcctgaagaaaagcctggaaaagatgcccctgatgcggagagccagacctaccagctgtagcacctgtagaatgtggtggaagggcaagaaacggcggaaagaaatcgtgcctatgagcctggcctgcagcatcaccgtgtcttttgtgggacagatcagcaccctggtgctggatgtgtctagcatcagccattggcggctgccctgtaaagtgaccgagagcagctccagcttcttctacaccagcgacaggacccctctgagcatcagcagaccaaccagcagagctagacagagctgttgtctgcccggactgacacaccctgctcaccaacctctgggcagcatgagcactagaagagagatgccaagccaggccacaccttctccacctggaccttggagagccgctctgggcaaagaagtgaagagatcccagagcaagctgcgcctgagaaacacaagccctggggagaagaacgatctccagctgttcgtgatgagcgacaccacctacaagatctactggacagtgatcctgctgaacccctgcggcaacctgcacctgaaaacaacatcactgcagcggccacctcggagcatcctgtctctgaatggaatctgggaagtgatgccccggacactggaaggctgcatcagcgtgaaggatcacagaaccagccagaaccacagcaagtgcatcaccgaatgtgtgcggactgccctgaacgtgtccaagaagagactgcctaagctgatgaagaagaaggacagcaccatcttcatcaacaaagtgcgccagaacttcaagcgcaacttcaagaagaagaaacccctcactttcagccccagcagacggatgactcggagaaccatgacaaccaccaaaatgatgatgatgcggcggaccaagcggagaaggcgcaaaaggcggagaatgaccatgatgaccagacggaccctgctgacaaagaaaacctgtctgacccctagaaccagcgccgccacaaaagctctgcctagacagaccatcagccagcggaggcctattcagaccccacctggaacatctctggccatctggggcagaacaagactgaccctgacaggcaccagatccagcggaacaagagcctctccttccgccgtgtgcctgtgttgttggacctgtccaagcagaagcttcccagccgcttctcctagtggactgagagcacctgttggagcccaggctcctcctgaagtgacactgagagcctcttgtgcctctagcgcctctaaagcctgtgctggactttggccttggggagcccaagttcgagttggagctggaacaggcggaggacctgcttgtgttcctgtggctgaagcttctacaggcgcatggacagctgaaggcgccgctggaacaagatgtagagcctctagagccccttgccgccaacttcctgctagctcccctaccaagtgtgaaatttgtgtgaagcgcagacggcggagaaagagaagcagccagtctagaagccccgtgcctaaaaagcgcgagaggatgatgctgcctgtgcgggccagaacagctagatctgcacttcctcagggcagagcacctctggaagggatgctgcttcctagagcactgcctagcctgctgagcagaatgcctgccagaagagagtcccggttttggctggctctgcaggcacttggactcagacctccacatctgcctagctgtcatcctctgcctcaactgttgggccctccacctcctcatcaggccccaatgacactgaaggccctggttaagacctggacacagttccgcaactaccccagagccgacaagaagaatgtccggtctaccgccttcttcctgctggacatcatcctgggcgattgcccaagaacaatggccggaccttctgcctctctgcatcctgcatctggcagagcctccagaaagacctggcagagaaggctgagagcttgtagagcaggcggacctgctggatgggctagacaggcctatcctagactgaaaaccttcggcgtgcccctgggctctattctgtgtctggccggcagcctgtccacaatgatgatcattagcaccaccagacaagagtgcggcaggcgggcttctgtgccttgtagacctatgatcggaagcgccagaccaggaccttggcggacatctgctatgcctagtgccatgggagtcgccctgcctacctcttgtgaaagcggaagatctcctcctgccaccggcggaagaatgccaggatctcagtctatcatgatgagctggatgcctccactggctccatgtgccgcttgtccatgttctcccgctcctacactgtgcccagcacatcctgctagagcaccaacagccgtgcctgcctttacacctctgtctgctcatcctgtgccagtgctgtctggatgtcacctggccgtcagaacctccatgctgacactgctgcccatggaagccaaaaagagcatgaagcggtccaacgctaagaaaatggaagatatgatctgggagagccggctgccactgaggccacaaagaggacctagacctctgcacagatggctgcagcagacaaccggctgtagccagaggcggatcgtgttctttctggccccatacttccctcggcaccctcacagatctccaccaacatcttgcccacctctgctggaagctttcccactgccaagagcttctctgagggccacagtgccaagacatagctctgttctcgccaccggtctgcacctccacagacagatttctctgcccctgagaggattcctcctgcaccaaccactgccaggacagcatctgtggctgtctcacagactgaggctgagactgcccaggacacagccatctttgcctggaccatgtgcaagcctgctgtccacactgtctcagccaccacctcaggctccatctcaagtgtggactgccgctacactgagatgtcctgctgttcctgcagctgcctgtcctcctgctctgagatccatgcctaagagccggaaccaggtgctgttcagacggaatctgaccccaagccagctgagaacactggccccaccttatatgctgctgccccagtctctgtcccagagcctgagtagaaagcagatccctagccagtccatgctcgtg

SEQ ID NO: 1097 - DNA, 4503 bp, Artificial Sequence
  polynucleotide 2A
agaaagatgcagagcctgaatcaccccagcagactgaccaatggctctcctccactgcacctgtgccagcctctgagaatgagcagaacccctcctagaagagtgtgcgccgctcctccacatagactgctgggcccttccagatggaaccctcggagaaagacctggaagatgcggaagaagtacgcccagaagcctagccagaagaaccacctgtacggcggcaagaagcgctctaagttcagcagaagccacctggacttcagcccctactggatgaagaaagtgaaggtgctgttcaaggccgaccagagcgagtctagcctgagcagcggaagatgcagcctgatggaacagatccctcacctgaagtctcggcggaagtggcagatcagacacgtgctgaagaacctgtggctgcccatgagaagcctgggagaaccttggagagccggctttcagtggggagagtctccttggcaagtgatggcctctctgaccggcagagccacatttctgctggccctttgggaatgtagcctgcctcaggcaagactgtgcctgatcgtgtctagaaccctgctgctggtgcagagccggaacaagaaaacaaagctgtggttcagcctgatcaacatccaccaccggaagaacccactgctgcctatgagatggtggtgtaccagaggcggcggaaagcggaaaaagaaaatgtgcaaggtgtccggcggctgcaccgcctgtgttgagagatgtccttggaagggcatctgctggaagtggcctgtgacagtggccgccattagaatgtgtgccctgtctcaccctagcttctacatcagcagcaccgtgtgctttctgagcaagcactgcatgaccgcctgcaccagaaagagaatgaagaccggcgccatccaagagaagggcgctattcaagagaaaggggccatgaccaagcggatctgcgtggtcaatttcgaggcctgcagagagatggaaagcctgagcgcccctgagaagatcaccctgtttgaagcccacatggcccggtgcacctccatcaatgtgctgtgtgtgcgggccagcctgattgagaagctgatgaaagaaaagcgcaagatgaagcggaaccaggtggcctctccacagatcatgcagcggctgttcatcaagggctaccagaacaaccacttcaccttccatctgcaaaacttcgccttcttcagctccttcggcaacaacaagtacatcaatatcctgaccatcctgttccacgtgcggaacatcgtgtacggcatccaagtgatgctgtgcgctagccctcagattatgcagagaaccagcgccgaccggttccggatgaagagaagaatgcagaatctggacaacctgggcgtgccatggcctctgttgcctggaatcccatctctgaacgcccagtggatgttcctgagaatcgcatccccgcaaatcatgcagaggatgagcgccgtgaacttcgagacaatccgggccagaaaccggaacatgaagaaaaccatgagccacctgatcgcccatcaggccctgaagatgagcggcctgagactgtttcaccccagactgctgacacggaagaagcccggaaaactgctgctcgcccatatgtacggcttcagcacctacggcacccagaaaggcgagtgcgtttgtctgcagtgtctgagcggcagcagcctgttcattctgaagcagcccctggacctgaagatcagcaagaccttcatgggccacagagagggcagcgagtctgataatctgggcctgctgtatagcttccctccaccttatcctatcagcgagggcctgaccatgaccaccggcagaaacatcaacagcaactccctgatgaccaactgcctgttcagccccatcttcctgtgccaccacgccatcatgcacagaaagatgacaagccctcacttcaggctgttcagcagcaagatcccacatcctcaggtgccatctgtggtggccctgtgcaagttccgggccttcatccacacacctagaagccctggctgcagcgtgtacgccaatatgtgctggcccaagttcttcctgaccttcagccagcagtggtccagcgtgacatctctggaatggacagcccaagagagaggctgcagcagctggctgatgaagcagacatggatgaagtcttggagcctgcgggaccccagctacagatccatcctggaatacgtgtccaccagagtgctgtggatgcctacctctaccgtgctgcaggctcatccacaagttccagctctggctcctcaagcctggtggcctgctagaagaggacctctgacatctgccccatccgctcagcagtccctgaccagagagaagattatcaaccccaccatcagctgcccctttcagagccccaccaagagactgatctaccctcctagcacctgttctctgccctgcagaggcttcctgcctagcagatttccttggggcccacctcctctgaacagcgtgatcgtgcacaagatcgtgctggtgttcctgaagtccctgtccagctacaactgcgagcggagaatcagcggcatccagaagagagccatcgagttcgccgtgctgaaactgctgaatatggacctgcctctcgagaacacacagatccccagaacaagcccactgtggaagatcacaatggtgctgacataccccaactgcgtggtgcatgtgctgatgtttggcgccctgagagccacagctcctgctacagctgcacctcaggctcagacccctcattggagagctgccacaacaagcagcatgagcagcagccctagagccgagcctacatcttctagctcttgggccacctgttggcccagatgctgctccagctcttgttactggtcactgtctagctggcctccagctggcgccgctgaagctacaaataccagaaccagaagccgcgagagccagaggggtagaatgctgacttggagaagctccctgtggttgcagggcaccagatgttttacaggcgtgcggaccagctccagatacaagaaaagaggcgtgatcgcctggcggagacagatcaatagacggaagctgcagagaaagaagcactggaacagcgcctacctgggcagaacactgctggtcacctgtatcctgtatcaccggtggatcgtgacctccatgtgtcagtcccagagatggctgaccagcaccacaagtagatctagcgccctgatgtggaccgagctgagcctggaaccatggattccctacctgcatcagcagaaaacccagcggacactggaatccgccggactgtttccttggctgcacacccagtgccaagagaagaaaagcagaaagctgatgtccagctgcacacacccctgcacaatgctgctgccacagggatgtcatcctgcctggctgagccctatctctgcctgtccaagactgctgccatatccttttcacgtgctggctctggaagtgacctttcctcctggaaccgccatgcctcagatgcagttgcaggctctggctatgtgggagaaaggctgggataagcctggcaccagcctgcagtgctacctgaacagaagaagaaacagccggaagcagagccaggtgcaactggccattcaggtgctgctcgtggacaagcacaagtactttctgttcggccaaaagaaaggccacatgatctttagcctggccaacggcctgtggtttaacctgattttcaactcccggaagaaactgctcgaggacatgaagcaaaatggcttcaccggcaaaggcctgacacaccccgtgcctctgaagcggactctgcagaacaaaagaaacaagaatatcaaacgcgtcaaccagaagaagggcaacatcaagcggaagtccatcctgctgcacctgattgtgctgaatagccccgagagcaacctgatcctgatccagcatggcggcatcttcacctttcggttctgggtcgagaagctgtcctggaacatctgcaagaacctgagcctgtacctggacaagttcgtgcagagactgctgtacgtgtacatcatcgagacaaacgtgttcgtgctgaacctgtttcatgtgcccgtgaaccagatcttcatgatggccttctacctgaagtacaccgagaaggcctgggtcatggaactggaatggctgatccaacagcagtgctatcagggcagctgcggcagagcttgttcttgtggaagaggctgtggcacccctagaggcgattggaagagacatcctcctcggagagccttctggaagcctcctagccagggcatctctagctgtctgatgaccggctgttggctcgagaagaaagctacctggatgcggcggacccgccggaagaagagggaagatcattgcggactgagacaccccagctggccttggacaagatgtctgaggatgaggcctccaagaagc

SEQ ID NO: 1098 - protein, 4518 aa, Artificial Sequence
  polynucleotide 3A
GGAGCTGCTGCTGCCTCTTGTCAGTCTCCTCCTTCTCCTCGGGAAACCACACCTAGCTCCGACGCCACCAGACGGACAAGACCTATTGCCGCTCAGAGCAAGAAAACCATGACAGCCGCCGGACTGACCCCTATGATCCGGAAGATCCAGAAGCGGCGGAGAACCGCCAACCGGTGTCTGAGAGTTAGATGTGGCGGCTGGCTGTGTGGCTGGACACCTAGAGGACAGAACACCAGAAGCACCAACCTGGAAAAGAACCCCAGCCTGAAGAAGCAGAGCCAGCGGAGAGGAAAGCTGAGCAGCCTGTTCTTCAGCCACTGCCTGTGCCGGAACAGCAGAAGGGCCACACCTACATCTAAGGGCAGCCTGCGGCGGAAGTACCTGAGAGTGCCTATTCCTCCACACCTGAGACACCCTCTGCTGCTGATGGACCTGGACGGAATGCTGACCGTGATCGGACAGGGACTCGTGGGCATGACCCCTAGAGATCTGGGAACAGTGGCTGGCGCCACCGCTCAGATTCAGAGGCCTATTCAGGTGCAGACCGGCGGCAGACTTACACCTCCTCCTCTGATTCTGTGGCCTCAGGCCGCTCCTGTTGATCCTCCTGGCTCTGTGTGGATTCTGCCCTGCAAGAACAAGAAGCGGAGAAAGCTGCGGCCCAAGCGGCTGGACTTTCACCCTAGATCTTCTAGCGGCGTGTCCGTGATCACCATGAAGCTGTGGGAGAAGCACTTCAAGGGCCTGAACTGGAACCTGGTCGTCTGGATTCTGAACCTGAAGATGATGAACATCGAGATCACCCCTCAGCGGAGCAAGGCCAGAAAGTCCGGCGTGATGAAGTGCTGGGATCTGTGCCCCAGCGAGAAGAAGAGGAAGCTGCCTCTGCCTCTGACCTTCAGCACCCTGCTGTGGGACTCTAGACATAGAGGCGCCAGCTCCAGCACCAGCAGAGACTCCAGAAGCTTTTTCACCAGCGCTCACCCCAGCAGACCCTGCAGAATGAGACTGTACCAGTTCCTGATCCACCTGAGAAAGGTGGACACCCACCATCTGCAGGTCGTGACCAAGACCGTGACAGCCACAACAGCTGACGGCCAGAGAATGCGGAGACTGAAGTGCAAGGCCTGCCGGCTGAGATGGGCTAGACCTGAACCTGCTGCTCAGGCCCCTCCAAAGAGCCACTTTCCACCTCATCCTAGCGGCCCTAGCAGAACCAGTTCTCTGCAGCTGCGGAGCATCCCTCACGTGCCAAAAGCCACAGCCGCTCACAGCGTGACAGTGAAGCTGCAGAAGGGAAAGAACAGCCCCTGCTGCCAAAAGAAACTGCGGGTGCAGAATCAGGGCCATCTGCTGATGATCCTGCTGCACAATACCTACATGGAAATGCACTACGGCCATCAGGCCCCACAGGTGGCCATGCTGCCTAAGCTGCTGTGCAGACAGATGCTGCCCACTCTGAGCACACTGCAGCAAAGACACCCACAGGGCCCTTGTCCTCCACCTGTGACACCACTGAGAGTCCAGTCTGTCCTGCTGCTGGGAGTGCCTCAGACAGCTGCTAGACAGCCTAGCAGACCCACCGGCAGAACCCCTACCACAAGACTGATGGCCCCTGTCGGCAGCGTGATGAGCTGTTCTCTGCTGACCCAGCCTTCTCCAGCCAGCGCCTGTACAATGCCTCCACTGCTGCATCCTCAGTGGGCCCCACATTCTGCTGGATTGTCTCCCGGCGCTTGCAGACCTGCCTGTACCTGTATCAGCATGACCACCATCTCCAGAGCCACCTGGCAGGTTTCCGTGTACAGCGGCAATCTGCTGAGCTTCTCCAGACGGGGCATGAAGAGTAGCGTGCGGCTGAAAAACAGCCGGCGGAACAGACGGTACAGAAAGATCTACGGCGAGCTGAAGATGTCCCTGCAGGCCGTGGCTCCTAGATGTCCTAGATCTGCCGTGGACATCAGCCCCGGACCTACCTCTCCTAGCCTGGCCTCTTGTGCCTCTGTGGCCATTGGAAAACTGGCCCTGCTTGGCGCTTCTGCCCCTTGTGGTGCTGCTGGCGCTAGAGAGGCTGGAAGATTTGCCGTGCTGGGCACCATGGTCATGAAGCACCTGAACCGCAAGCTGCATCTGACCCGGTCCTGCCTGATCGATCTGACCATGATGATGAGCCAGAAGCTCTGGAAGAACCAGCGGAAGAGAATCCCTCTGCCATCTCCTAGACAGCATCTGCTCCCTCAGTACCCTCTGCACCCTCCTCCACCTTGTCTGCTGCTGCTCCACCACAGACACCACCTGGCCTTTCTGGAAATGGCCTGCAGCAGCCAGCACACCCACTCCATCAAGATCTGGATCAGCTTTAGCCACGAGCAGAGCAGCCCATTCCTGGCCAGATCCTGGAACACCATGCAGTGGAACAACAAGAAAATGGCCATGACAGTGATCGCTGGCGCCCACCACTGTCAGTACAAGCTGACCTACACCAAAGTGTGGAAGATGAATTGGAAGAAAATGATGATCGGCTCCCAGCACCTCCTGTTCAGCCCTCTGGATAGCTCTCCACTGCAACTGCTGCTTCACCCTCACGGCAAGAGATGCAACCCTTGCTGCAGACTGACATGGATGTCCATGCTGCAGAAACAGTGCTGCTACAACCTCGTGATCAAGCACCCACTGATCTTCAGAATCAACCTGCGGAGACAGGGCAAGACCAAGGATGGCGTTGTGCAGAGCCTGGGCTTCCTGAACCAGCAGATCATCCTGCAGAAAGAGTTCTTCATCTGCCTGCTCATGTTTATCAAGCGGTGGAAGCCTGCCGCCACCAAGAGAGAGTGGGAGAAACGCAAGCAGATCCTCGGCGGAGGCGGCAAGTACAAAGAGTACTTCCTGAAGCGCATCCTGATTCGGAAGGCCATGACTGTGCTGGCCGGCGACAAGAAAGGCCTGGGCAGATTCATGAGATGCGTGCAGAGCGAGACAAAGGCCGTTAGCCTGCAGCTCCCACTCGGAAGAGGCCCTGTGTACTACGTGTGCAACCGGATGAACGTGTCCAGCGTGCTGAAGCCCTTCCTGTTCACCGTGCCTATCGAGGACATGAGAGAGTGCACACTGGGCCGCAACAGAATGAATGTGTCCTCTGTGCTGAAACCCTGTCTGATCCCTGTGCCAATCGACCTGCCTCGGATGCTGCCAATCAGCAGCCCACTGCACAGACCCCAGATGCCATTCTGGACCTGCACCTTTCCTGCCACAACATGGGGCACCTGGGAGACACCTTCTACATGGGGCTGGCGGACCTTTCGGGGCCCTAGAAGAAAAGTGCTGATGGTGCTGTGGCTGCCCGCCAACCAGAGTCTGCAGAAAAGCCAAGTGTTCCAGTGGGTCCTGCGGACCGAGAACATCCGGAAGCTGATCTGGACCAAGCAGCGGAGCTTCCTGTCTCTGTTCCCCAAGCTGAGAGCCACCGAACAGATGACCAATGTGGGCTGCGCCTTCAGCGGCCGGATTCTGCATCAACCTGAAATGGCCGCCATGCGGCTGATGCCCAAGTTCCTGAATAGCACCAACAGCTGGTGGACCTGTACCAACCTGAGCGTGCCCATGATGCTGACCATTCTGATTTGGAAGCGGGTGTTCATTCTCCTGCTGTCCGACAAGAAGCTGCTGAAGAAGTCTAGCCAGCTGAGGCGGTCTTGGAGAAACGTGTCCCGGATCAGCCACCAGATGAAGTGTCTGACCGCCGTGGACTGTCTGCAGGCCTTCTGGGACATGAACATGGAACACCGGCTGACCATGGACAGCGCCCTGAGCCTGACAAAGAGAGAGGGACCCGAGACTTGCAAGAAGAAGCTCCTGCTGAAACTGCTGACAATGAGCCTGAGCAACATCCTGATGAAGTTCCGGCTGCGGCTGAGAATCCCAAGCCTGAGGAAGTATCGCCAGCATCTGAAAAAGACCAGCGCCAAGGGCGAGAAGCTGAAGCACTGCTTTAAGGCTTGGGGCAGAGGCCCACCTCTGCACACAAGAAGCCAGAAGAAAGACCCTGCCGGCAAGCTGAAAAAACTGACCACACTGAGCTTCGTGCTGATCGAGGAACGGCGGAACCTGCAGCGGAATCTGAAAGTCCTGTGGCTCAAGAAAAGCACCAAGAGCCGGTATCTGTTCTTCCTGACCGTGTGCGGCTTCTTCGAGAAGAAACGGCCTGAGTGGCTGTCCTCCAGAAAGAAGGGACACACAAAGAATCGGAGGAAGGCCAAGCGGAAGCCCCAGATCGTGCACAAGAAGAGAGGCCTGTTCCTCAAAAAGAAATACCTGGTGCAGGGCGCCAAGAAGATCACCTTCCTGTCCAACGGCATGGAAGCTTGCGGCACACACCCCACACCAAGACTGAGCGACAGAGTGTTCCTGGTCAAGATCACCACCACCACAAGCAGCCCCAGAAGAAGCCCAGCACTGAGAGCTAGAGGCGGCACCACAATTGGCGAAGTGACCAGCCTGTGCTTCTTCTACCTGCTGTAC

SEQ ID NO: 1099 - protein, 4521 aa, Artificial Sequence
  polynucleotide 4A
ATCCAGAAGAAGAAACAGAAATCCATGGCCAAGAAGTCCCAGCAGCCTCTGGTGCTGAAGAAGAACCGGAAGCAAGAGTGGGGAGGACAGGCCCACAGACAGAGAAACAACGCCAAGAAGATGCCCTTCCAAGAGGAAAAGAAGAACGGCCGGATCAGCAGCAGCCTGATCCTGAGCTTCCAGAGAGTGAAGGACAGCAAGAAAATGACCCAGAAGATGTGCAGCTCTCTGGCCCTGCCTACAGGCCTGACATCTCTGATCCTGCCTAGCAGCGATCTGGCCGTGCTGATCTCTAGCAGCACCAGCCACTTTCTGATGCGGAGCCCTGTGCTGCCAAGCTCCAGACTGACATGTGCCTCTCCACAGCTGCCCCGGATGTGGACATGGTCTAGCTGGCTGAAGCACCCCAGAACCGCTAGCATCACACTGCCTACCACAAGCCTGAAGGGCAGCAGAACCAGCTGCTGCCCAAGATCTCACCCCAGACTGCCTAGGACCAAGTGGCCTCTGCAGTGTCTGCTGCACAGCCTGGGAACAACAGGCACACTCGTTTGGGAAAGGGGCGTGCTGCAGATGAGAAGCCTCGAAGCCCATTGTCCTCTGCAGACCTTCCATCTGCACCACTGCAGAACCCAGCCAAGCTCTTGTCCTCCTGCCTGGATTCTGTACCAAGGCCAGTGGAGCGGAGCCGTCGTTGGACTTAGACCCGTGGCTCACCATCTGCCTAGACCTATCCAGGGCCTGCACTGTCCTCAGGCTCCTCATCAACCTGCTCTGAGCTGGGGAAAGTGGCCCGTGGGAATGACAGGACCTGCCAGATGCTGTCGGTGGCCCCGCAGATCTCAGAAGTCTCAGCATCACTGCGCCCTGCGGAAGATCGAGTGGGCCACAAAACTGTCTCTCGGCGGAAAAGCCGGACCACAGGCTCAAGAGAAGGCCAGACCTTCTCCTTGCCTGTCCTGGTCCAGCAGAATTGTGGCCCCTGGACACGCCCTGAGCTGTCGGACTCGTAGAAGATGGTCCTCCAAGTGCAGAGGCGGCCCTAGCGCCAGCGATAGATGTTGTAGCTGTAGCCCCAGCGGCTTCAGCGCCGGAAGAGGCAGATGTCCTGTGCAGGGATGTCTGAGGCCACACAGAGTTCAGCTGCTGAGAAGATGGGGCCCAGGATCTCCTGCTGGCCAGAGACTGTCTAAGGGCTTCCAACTGCTGCGTTGGTGGGGACCTGGATCTCCAGCTCCTGAGCCTAGAAAGGGCCCATTTCCTCCACCTGATCCTCCATGGCCTGTGACCGCTGTGACAGTGATGGCTGGCTCTGTGCCTAGCGCACAGTCTGTGGATGCCCTGGAATCTCCTGGACCTCTGGCTCTGGAAGGCCCTAGCAGCCCTAGAAACCTGCTGTGGCGGGAAATGAGCATCTTTCTGCCCGGCATCTTCTGCCAAAAGAAGGTGCCATCTGCCAGCCCCTGGGGACTTGTTCCTCCTTCTCCACCACTCGCTCTGGGCCCTAGAATGCAGCTGTGTACCCAGCTCGCCAGATTCTTCCCCATCACACCTCCAGTGTGGCACATCCTGGGACCTCAGAGACACACACCTCAGGTGGTCCTGAGACTGGGCAACCTGCCTCCATTCTTCAGAGGCAGCGAGGTGCCCTTTCCTAGACCTTGCCGGACCAAGAACGAGGGCAACAATCACTGGCCCAGAGTGGAAATGCCTACCGGCTGGCTGCTCGTGGGCTACAACACCAGAAACACAGCCCAGAATCCTCGGCTGCAGCAGCATCTGAAACACTGGCAGCAGTGCACACGGGCCAGATGGTGTCAAGAGCCTTGTCAGACCCTGACCTTCTTCCACTTCTTCTTCTTTTTCAAAACGGTGTCCCTGTGTTGTCCCGGCTGGTCCAAAGGACAACCTCCACCTCCTGGCCTGAAGCCTTCTAGCCTGGCTTCTCAGGTGGCCAGAACCACAGGCGTGTACCAGCACGTGTGGCTGATCTGCTTCGTGTTCTTCGTGTGCGTGGAAACCGGCTTCTGTCACGTGGCACAAGTGGGCCTCGAGAGACTGGTTTCTCTGAGCGGCATCACCGACGTGAACCATTGGGCCCAGCCTAAGCCATCTCCTAGCAAAGGCACCGGCATGAACAGACCCATCGGCCTGAGAGTTGGCAAAGGCGTGTGGGCCAGACTGCTCAAGAAGAAGCCTAGAGACATCTGTCGGATCTCCAACAGAAAGACCCGGAAGGCCGCCAGAGAGAAGCACCGCAAAACAGATAGAGCCAGCGTGTCCTTCTGGACTCTGCTGCCTACAACAGGCGTGCGGACAAGAGGAAGCCCTCTGAGACTGACTCTGTGGCCTCCTAGATGCAGATGCAGACGCGAGTACAGAGTGACCATGAACATCCTGAACAGCCTGCCAAGCAGCATGGAAATCGCCGTGCTGCAAGAAACCGCCAAGAAAAGCCCTACCAGCTTCTGCTGCAACCTGGACCTGCAGCATCAGCGCAGACGCAAAAAGAAGAAAGACAAGGTCGAGATCCGGAATCGGAGCCCCAAGGCCAATAGCACAGAGTGTCAGGGCGAGCACAGCAGAGAGCAGAATCTGCTGAATCTGGTGCAGCTGAATCCTCACAGCCCTCACCACCGGAAGGACGAAGAGGACCACCAGAAGAGACACCACCACCACAATCAAAAGAAGATGAGCGTCCCACTGTTCTTCCACGGCGACCTGTGTAGAGAGAGCACCCTGGGCAATTTCTGGATGAAGCTGCTCCAGCTGCCTCAGAGGCCTCCACTGCAACCAGTGACCGGAATGGAAATCCTGCTTTGGATTCTGCTGAAGATGGAAATTCAGATCTTCAAGATTTGCCTGGGCGAGATGCAGCTCTGCACCTCTCGGATTCTGAACCTGCAAGTGCTGAAAAAGATCCTGCGGAGCTTTATGAAGCTGTACCACAGCCTCGTGATGTGCCTGCGGCTGAGGACCAAGCTGGAAAAGGCTCTGAGCGCCCTGTTCATCTGGCCTCAGCACTCCTACAAGATCACACACCCATTCGCCAGCCAGCCACTGGGACAAGAGATGCCCAACAACACCCAGATCCGGCTGCTGAAGCCCGACAAGAAGAAGAAAAGCACCGAAAAGACCAAAGGCCAGGCTTTCGGCAGCTTCTCCGCCGATTTTTCAGCCCCTCAAGGACAGGCTTTTGGCTCCCTGTGTCAGCTGGTGTCCGCCGACTTTAGCGCCCCACAAGTGACCAGACTGCGGAGCCTGAACCATCTGCTGATTTGGCTGAAGAATTGGAAGCGGTTCAAGCTCAAAAAGAAATATCAGGCCCCTCTGCGGCTGTGGTCTTGGTGCGGAACAAGCCAGACCTACTTCGGCAGCATCATCTGTATCAAGAATATGTTCCTGCAGCGGAAGGGTTTCCTGAACCTGAGCCACGTGGAAAAGTTCGAGCTTAAGAAGAATCTTCTGCTCCCCGTCGTGATCAACCTGAAGAGACTGCAGAAATTCATGCTGAACCAGAAGTGCCTGGCTCCATTTCCTGCCTGCACCAGCAAAGCCTGGACACCCAGAAAACTCGTGGGCAGAGCCGTGCGGAGAAAGGGCATTCTGGCCATGACACTGACCCTGAACGGAATCGAGGCCCTGACAGCCCTGTTTACCTGTAGAACCGCCTCCATCAGCGTGAACATCAGCACCCTGATGAGCATCCTGGAAGCCATCATCAAGAAGATGAAGAAACGGATCATGGTGCACCGGTGGATCTTCTCCAATCAGCTGACCGTGCAGATGCTCTGCCTGCCTCTGCTGACCCCTGACACCAGATGGATCTTTAGTAATCAGCTGCAGACAGTGCAAATGCTGTGTCTGCCACCTCTGAAGCAGGGCGAGAGAATCATTTGGCCACTCGGCGGCTTTCAGATCCCCAATTTCTTCTGGTCCCTCGGCATCGGACACACTGGCGCATGGTGGCATACTGGTAGAAGGCGGAGAGAGTGGGGCGGCTCTACCGTGTCTAGAAGCCCACTGTGGATCAGCTCCATGATCTACCTGAGAGGCATGGCCTTCGCCAGCGACAGCTCCATCAGAACCACCAGAGTGTCCTGGTGTCGGAGATGTGGCGCCAAGTCTGCCGCAGCCTCTTCTTCTCCACTGTGGGATTGCAGCACCACAACCGGCACACACCACGGATGCCTGTGGGAGATCCCTAGCGTTACCCTGCTGGCTAACCTGCACCTGTGCTACTACCACTCTCAGAGCAACAGAAACAAGAGCCGCCAGATGGAATCCCTGGGCATGAAGCTCCAACTTAAAAAGAAAGTGAACGCCTGCAGCACCTACACACCCCACATCTGCAGACACACCTGTCGCGTGAACGCCGTCGAGGAACTGCACTCTAGAAGGATGTCCGTGCGGATCGTGAAAAATTGGGTGTCCTGCTGCTACGTGCGGCTGTCAGCTGTGGGACTGTCTACTTGGAGCGCTCTGGACAACAAGATCATCTGCAAGGGCCACAGAATCACC

SEQ ID NO: 1100 - DNA, 4521 bp, Artificial Sequence
  polynucleotide 1B
accgagatccaattgaccatgaacgacagcaagcacaagctggaaagccccgctctgaaacaggtgtcaccagcctctccacctactcagcagcctcagacacctcaggatagcagacaggtgctggccatgcctagcagctggtctagctctggcagaacccagcggaaggtggtcaagaatcctagccagcctgtgcctctgagaaacgacggcatcaccaacggcaacgactccaccagaagctgcagcatcagcctgaagaaaagcctggaaaagatgcccctcatgatgaagaagaaggacagcaccatcttcatcgtgcccatgagcctggcctgtagcatcaccgtgtctttcgtgggccagatcagcacactggtgctggatgtgtccagcatctcccactggaacaaagtgcggcagaacttcaagcggaacgccgacaagaagaacgttcggagcggcgagaagaacgacctgcagctgtttgtgatgagcgacaccacctacaagatctactggaccgtgatcctgctgaacccctgcggcaatctgcacctgaaaaccaccagcctgggcgactgtcctagaacaatggccggaccttctgcctctctgcaccctgcatctggcagagcctctagaaagacctggcagagaaggctgagagcctgtagagctggtggacctgctggatgggccagacaggccttcgataagaaaggctttgtgatcctgagcgtcggagccggaacaggcggaggacctgcttgtgttcctgtggctgaagcttctacaggcgcttggacagctgaaggcgccgctggaacaagatgtagagcttctagagccccttgcagacagctgcctgccagctctcctaccaagtgcgagatctgcgtgaagcgcagacggcggagaaagagaagcagccagtctagaagccccgtgcctaagaaacgcgagagaatgatgctgcccgtgcgggccagaacagctagatctgcacttcctcaggggagagcccctcttgagggaatgctgcttcctagagcactgcccagcctgctgtctagaatgccagccagaagagagagccggttttggctggctctgcaggcacttggactcagacctccacatctgcctagctgtcatcctctgcctcaactgcttggccctccacctcctcatcaggcccctacagctttcttcctgctggacatcattctgcggctgccctgcaaagtgaccgagtctagcaatatgggcggcaacagatccatctgcctgaccaacgccaagaaaatggaagatatgatctgggagagcacgcccctgagcatcagcagacctacatctagagccaggcagagctgttgtctgcccggactgacacatcctgctcaccagccactgggatctatgaccctggccatcagattcatcagcgctcctcagcctagctccagcacagtgacagctgctcctagcggccagtacttcaagggcaagaagcggcggaaagagatcttcaagaagaagaaacccctgacattcagccccagcctggccaaaaagaccctgaccaatagcagcttcttctacaccagcgaccgcgaggccaagaaatctatgaagcggagcatgaccctgaaggccctggtcaagacctggacacagttcagaaactaccccagagcctcctctcctggacaccctctgggacctaatggcatctgggaagtgatgcccagaacactggaaggctgcatctccgtgaaggaccacagaacaagccagaaccacagcaagtgcatcaccgagtgtgtgcggacagccctgaacagaagaagcaagatcgaggcctctcctatcggctctatcgccctgagatccatgcctaagagcagaaaccaggtgctgttcagacggaatctgaccccaagccagctgagaactctggcccctccttatatgctgctgccccagtctctgagccagagcctgagcagaaagcagatccctagccagtccatgctggtggcctctagagcaggacagtttcctgtgtggcggagaaccagcagaggaatgagcctgcagtggaagtccggcaatgcctgcacacctctgagatgccctagcagaagccctgccacattcctgacagctctgaacggctggcacagatctggactgagagcccagagaaagcgcaagcgcgagaagagaagccagaagtccaggcagaaccatctgcagctgaagtcctgccggcgcaagatctccaactggtccaagctgagaagcccctggatcttcgtgtccaagaagagactgcccaagctgaccaagtgtgaaatctgtgtcaagaacaccgccatcctggctatcaccctgatcacccctcaggaccctcatctggaccctgtgtgtcaccctcatagaaggcctggatggaagggccaccacagagtggtgttttctcatcaccctagcggcagcaccaagagccactggcagcaaagagaacgcggaggcggcagacgggaaaagaagggctgtagagagagatccctgctgtactccagaatgtgcctggtgcagatccccacacacacctgggagcccgattacttcgtgtctctgcccatgatgttcagctgggccacacagtcattccccgtgggagccgtgtttctgaccagacctgccattccttgctgtagctgcacaagccacagcaacccttggagtcagagcagacacccacacagaagcccacctacctcttgtcctccgctgctggaagcctttccactgcctagagcatccctgagagccaccgtgccaagacatagctctgtgctggcaaccggactgcatctgcacagacagatttctctgcccctgagaggattcctgctgcatcaaccactgccaggccagcatctgtggctgtctcatagactgcggctgagactgccaagaactcagcggcctcctagatccatcctgagccttagactgccactgaggccacagagaggacccagacctctgcatagatggctgcagcagaccacaggctgtagccagagaagataccccagactgaaaaccttcggcgtgccactgggctccattctgtgtctggctggatctctgagcaccatgatgatcattagcaccaccagacaagagtgtggcaggcgggcatctgtgccctgtagacctatgatcggaagcgccagaccaggaccttggagaacatctgctatgcctagcgccatgggcgtcgcactgcctacaagctgtgaatccggaagatctcctcctgccaccggcggaagaatgcctggaagccagagcattatgatgagctggatgcctcctctggctccttgtgccgcttgtccttgttctcccgctcctacactgtgtcccgctcatcctgctagagcacctacagccgtgcctgcctttacacctctgtctgcacatcctgtgcctgtgctgtctggatgtcacctggccgtcagaacctccatgctgacactgctgcctatgctgaagctggccccactgcaagtgaccaccacactgaagctgatcctggtcatgctggaaatcgtgaccgagagcactcggagagagatgccttctcaggccacaccttctccacctggaccttggcgagccgctctgggcaaagaagtgaagagatcccagagcaagctgcgcctgagaaacacaagccccatcgtgttctttctggccccatacttccccagacggatgaccagacggaccatgacaaccaccaaaatgatgatgatgcggcggaccaagcggagaaggcgcaaaaggcggagaatgacaatgatgacaaggcggaccctgctgacaaagaaaacctgtctgacccctagaaccagcgccgctaccaaagctctgccaaggcagacaatctcccagcggaggcctattcagacccctcctggaacatctctggccatctggggcaaccagcagctgaaatggacccctcacatcctgaagtccgccagcagaagggccagacctaccagctgtagcacctgtagaatgtggtggatcgccaaaaagcggatcaagctgcggcggaacagaaccagactgacactgacaggcacaagaagcagcggcaccagagcttctccatccgccgtttgcctgtgttgctggacctgtccttccagaagcttcccagccgcttctccaagcggattgagagcacctgttggagcacaggcccctccagaagttacactgagagctagctgtgcctccagcgcctctaaggcttgtgctggactttggccttggggagcacaagttcggcaaccatctttgcctggaccatgcgcttctctgctgagcacactgtctcagccacctccacaggctccatctcaagtgtggacagccgcaacactgagatgtcctgctgttccagctgctgcctgtcctcct

SEQ ID NO: 1101 - DNA, 4053 bp, Artificial Sequence
  polynucleotide 2B
agaaagatgcagagcctgaatcaccccagcagactgaccaacatgagcagaacacctccaagacgcgtgtgcaaccctcggagaaagacctggaagatgcggaagaagtacgcccagaagcctagccagaagaaccacctgtacaacagccggaagaaactgctcgaggacatgaagcagaatggcttcacaggccacagagagggcagcgagtctgataatctgggcctgctgtactcctttcctcctatccggatgtgcgccctgtctcaccctagcttctacatcagcagcaccgtgtgctttctgagcaagcactgcatgaccgcctgcacacaaaagaaaggccacatgatcttcagccgcgagaagatcatcaaccccaccatcagctgcccctttcagagccccacaaagcggctggaactgagcctggaaccttggattccctacctgcaccagcagaaaacccaaggcggcaagaagagaagcaagttccctggcaccagcctgcagtgctacctgaacagatgcagcctgatggaacagatccctcacctgaagtccgcctctccacagatcatgcagagaaccagcgccgaccggttccggatgaagcggagaatgcagaacctggacaatctgggcgttccatggccactgctgcctggacctctggaaaacacacagatccccagaacaagccctctgtggaagatcacaatggtgctgacataccccaactgcgtggtgcacgtgctgatgttctggctgcctatgagatctctgggcgagccttggagagctggctttcagtggggagagtccccttggcaagtgatggctagcctgacaggcccctatcctatcagcgagggcctgaccatgaccaccggcagaaacatcaacagcaactccctgatgaccaactgcctgttcagccccatcttcctgtgccaccacgccatcatgcaccggaagatgacaagcccacacttcagactgttcagcagcaagatcccacatcctcaggtgccatctgtggtggccctgtgcaagttcagagccacatttctgctcgccctgtgggagtgtagtctgcctcaagccagactgtgcctgatcgtgtctagaaccctgctgctggttcagtctgccgctcctccacatagactgctgggcccttctagatggtccagaagccacctggacttcagcccctactggatgaagaaagtgaagctggccaacggcctgtggttcaacctgatcttcgtgctgttcaaggccgaccagagcgagtctagcctgtctagcggccggaacaagaaaacaaagctgtggttctccctcatcaacatccaccaccgcaagaatcctctgctgcccatgagaatccccagcctgaatgcccagtggatgttcctgagaatcctgcttctggcccatatgtacggcttcagcacctacggcacccagaaaggcgagtgcgtttgtctgcagtgtctgagcggcagcagcctgttcattctgaagcagcccctggacctgaagatctccaagaccttcatgctgcaagctcacccacaggtgccagctcttgctcctcaagcttggtggcctgctagaagaggccctctgacatctgctccatccgctcagcagtctctgacagctagccctcagattatgcagcggatgagcgccgtgaacttcgagacaatcatctaccctccaagcacctgtagcctgccttgtagaggcagaacactggaaagcgccggactgtttccttggctgcacacccagtgtacacacccctgtaccatgctgctgccacaaggctggtggtgtacaagaggcggcggaaagcggaaaaagaaaatgtgcaaggtgtccggcggctgcaccgcctgtgttgagagatgtccttggaagggcatctgctggaagtggccagtgacagtggctgctcagtggtctagcgtgacctctctggaatggacagcccaagagagaggctgcagcagctggctgatgaagcaaacatggatgaagtcttggtccctgcgggaccccagctacagatccatcctggaatacgtgtccaccagagtgctgtggatgcccacaagcaccgtgcggagaagaaacagcagaaagcagtctcaggtgcagctggccattcaggtgctgctcgtggacaagcacaagtactttctgttcggcagagcccgcaaccggaacatgaagaaaaccatgagccacctgatcgcccatcaggccctgaagatgagcggcctgaggctgtttcatcctcggctgctgacaagaaagaagcccggcaagttcctgcctagcagatttccttggggccctcctcctctgtgtcatcctgcttggctgagccctatctccgcctgtccaagactgctgccatatccttttcacgtgctggccctggaagtgacctttccacctggaacagccatgcctcagatgcaactgcaggccctggccatgtgggagaaaggctgggataagcggaagagaatgaagaccggcgccatccaagagaagggcgctattcaagagaaaggggccatgaccaagcggatctgcgtggtcaatttcgaggcctgcagagagatggaaagcctgagcgcccctgagaagattaccctgtttgaagcccatatggcccggtgcacctccatcaatgtgctgtgtgtcagagcctctctgatcgagaagctgatgaaagaaaagcgcaagatgaagcgcaaccaggtggcatccccacaaattatgcagaggctgttcattaagggctaccagaacaaccacttcaccttccatctgcaaaacttcgccttcttcagcagcttcggcaacaacaagtacatcaatatcctgacgcggcgcaagaaaagagaggaccactgcggactgctgatcctgatccagcacggcggcatcttcacctttcggttctgggtcgaaaagctgagctggaacatctgcaagaacctgagcctgtacctggataagttcgtgcagcggctgctgtacgtgtacatcatcgagacaaacgtgttcgtgctgaacctgttccacgtgccagtgaaccagatcttcatgatggccttctacctgaagtacaccgagaaggcctgggtcatggaactggaatggctgatccaacagcagtgttaccagcaagagaagaaaagccggaaactgatgagcagctgccgggccttcatccacacacctagaagccctggctgcagcgtgtacgccaatatgtgctgggccttttggaagcctcctagccagggcatcagctcttgtctgatgacaggctgttggggcagccctcctctgcacctgtgtcagcctctgaggcggtataagaaaaggggcgtgatcgcctggcggcggagaaagtggcagatccggcatgtgctgaaaaacctgatcctgtttcatgtgcggaacatcgtgtacggcatccaagtgatgctgtgcggcaagggactgacacaccctgtgcctctgaaacggaccctgcagaacaagaggaacaagaacatcaagcgggtcaaccagaagaagggcaacatcaagaggaagtccatcctgctgcacctcattgtgctgaatagccccgagagcaaccccaagttcttcctgacctttagccagctcgagaagaaagctacctggatgagaagaacaggcgccctgagagccacagctcctgctacagcagctcctcaggctcagactcctcattggagagccgccacaacaagcagcatgagcagcagccctagagccgagcctacatcttctagctcttgggccacctgttggcccagatgctgtagctccagctgttactggtccctgagttcttggcctcctgctggcgccgctgaggctacaaacaccagaactagaagcagagagtcccagcggggcagaatgctgacttggagaagtagtctgtggctgcagggcaccagatgttttacaggcgtgcggaca

SEQ ID NO: 1102 - DNA, 4518 bp, Artificial Sequence
  polynucleotide 3B
ggagctgctgctgcctcttgtcagtctcctccttctcctcgggaaaccacacctagctccgacgccaccagacggacaagaccaattgccgctcagagcaagaaaaccatgacagccgccggactgacccctaagaacaagaagcggagaaagctgcggcccaagatgatccggaagatccagaagagaaggcggaccgccaaccggcggaatagcagaagggctacccctacaagcaagggcagcctgagaagaaagtacctgagagtgcggggacctcctctgcacacccggaacatcagaaagctgatctggaccaagcagcggagcttcctgtctctgttccccaagctgagagccaccgagcagatgaccaatgtgggctgctctatccctcacgtgcccaaagccacagccgctcactctgtgacagtgaaactgcagctgcccctgaccttcagcaccctgctgtgggatagcagacacaccatgagcctgagcaacatcctgatgaagttccggctgcagtctagcccattcctggccagatcctggaacaccatgcagtggaacaacaagaaaatggccatgaccgtgatcgctggcgcccaccactgtcagtacaagctgacctacaccaaagtgtggaagatgaactggaagaaaatgatgatcggcagccagcatctgctgttcagccctctggatagcagtcccctgcagctcctgctgcaccctcacggcaagagatgcaacccttgctgcagactgacctggatgagccagaacaccagaagcaccaacctggaaaagaaccccagcctgaagaagcagagccagcggagaggaaagctgagcgcctttagcggcagaatcctgcaccagccagaaatggccgccatgagactgatgcccaagttcctgaactccaccaacagctggtggaccctgaccacactgagcttcgtgctgatcgaggaagccagacagcccagcagacctaccggcagaacacctaccaccagactgatggcccctgtgggcagcgtgatgagctgttctctgctgacccagccttctccagccagcgcctgtacaatgcctccactgctgcatccacagtgggcccctcatagtgctggactttctccaggcgcttgcagacctgcctgcacctgtatcagcatgaccaccatcagcagggccacatggggcccagtgtactacgtgtgcaaccggatgaacgtgtccagcgtgctgaagcccttcctgttcaccgtgcctatcgaggacatgagagagtgcaccctgggcagaaacagaatgaatgtgtcctctgtgctgaaaccctgtctgatccctgtgccaatcagcgagaagaagaggaagctgcccaacatcgagatcacccctcagcggtctaaggccatgctgcagaagcagtgctgctacaacctcgtgatcaagcaccctctgatcttcagaatcaacctgcggcggcagggcaagaccaaagatggcgttgtgcagagcctgggcttcctcaaccagcagatcatcctgcagaaagagttcttcatctgcctgctcatgttcatcaagcggtggaagcctgccgccaccaagagcagaaagaagggccacaccaagaacagacggaaggccaagagaaagccccagatctacctgttcttcctgaccgtgtgcggctttcacctgaaaaagaccagcgccaagtggctgaagaagtccaccaagtccagatccaacggcatggaagcttgcggcacacaccccactcctagactgagctgcctgagagttagatgcggcggctggctgtgtggctggacacctagaggtagaaagtccggcgtgatgaagtgctgggatctgtgccccgtgcacaagaagagaggcctgttcagactggattttcaccccagaagcagctccggcaagggaaagaacagcccctgctgccaaaagaaactgcgggtgcagaaccagggccatctgctgatgattctgctgcacaatgaccgggtgttcctcgtgaagatcggcgagaagctgaagcactgtttcaaggcctggggctccagacggaaccggcggtacagaaagatctacggcgagctgaagatgtccctgcaggccttcctgatccacctgagaaaggtggacacccaccacctccaggtggtcaccaaaacagtgaccgccacaacagccgacggccagagaatgcggagactgaagtgcaaggcctgccggctgagatgggccagacctgaacctgctgctcaggcccctcctaagagccactttccacctcatcctagcggccccagcagaacaagtagcctgcagctgagaagcctgttctttagccactgcctgtgcagccagaagaaggaccctgccggcaagctgaaaaagctgctgaagaaaagcagccagctgcggagaagctggcgcaatgtgtccagaatcagcacccctcctccactgatcctgtggcctcaagctgctcctgtgtccgtgatcaccatgaagctgtgggagaagcacttcaagggcctgaattggaacctggtcgtgtggattctgaacctgaagatgatgacctacatggaaatgcactacggccatcaggccccacaggtggcaatgctgcctaagctgctgtgcagacagatgctgcccactctgagcacactgcagcagagacatcctcagggcccttgtcctcctcctgtgacacctctgagagtccagtctgtcctgctgctgggagtgcctcagacagccagaggacctagaagaaaggtcctgatggtgctgtggctgcccgccaatcagtctctgcagaaaagccaggttttccagtgggtgctgcggacagaggtggcccctagatgtcctagatctgccgtggacatcagccccggacctacatctcctagcctggcctcttgtgcctctgtggccattggaaagctggcactgcttggcgcctctgctccttgtggtgctgctggcgctagagaggccggaagatttgctgtgctgggcaccatggtcatgaagctttgtttcttctacctgctgtaccggctgcgcatcccaagcctgaggaagtacagacagcacctgaaccggaagctgcacctgacaagatcctgcctgatcgatctgaccatgatgatgtcccagaagctctggaagaaccagcggaagagaatccctctgccatctccacggcaacatctgctgccacagtaccctctgcacccacctccaccttgtctgctgttgctgcaccatagacaccacctggcctttctcgagatggcctgtagctctcagcacacccacagcatcaagatctggatcagcttcagccatgaagtggaccctccaggcagcgtgtggatactgccttgcgatctgcctcggatgctgccaatctcttcacccctgcacagaccccagatgcctttctggacctgcacctttcctgccacaacctggggcacatgggagacaccttctacatggggctggcggactttcagaggcgctagcagcagcacatcccgggacagcagatccttcttcacctctgctcaccctagcaggccctgcagaatgagactgtaccagtgcaagaagaagctcctcctgaaactgctgaccaccaccacaagcagccccagaagatcccctgctctgagagcaagaggcggcaccacaatcggcgaagtgaccagctgtaccaacctgagcgtgcccatgatgctgaccatcctgatttggaagcgggtgttcatcctcctgctgagcgataagaagggcgccaagaagatcaccttcctgcctattcctccacacctgagacaccctctgctgctgttcgagaagaaacggcctgagtggctgagcatggacctggacggaatgctgacagtgatcggccagggactcgtgggcatgacccctagagatctgggaacagtggcaggcgccaccgctcagattcagcgacctatccaggtgcagactggcggcagactcagaagaaacctgcagagaaacctgaaggtgctccaggtgtccgtgtacagcggcaacctgctgtcctttagcagacggggcatgaagtctagcgtgcggctgaaaaaccgcgagtgggagaaacggaagcagattctcggaggcggcggaaagtacaaagagtacttcctgaagcgcatcctcatccggaaggctatgacagtgctggccggcgacaagaaaggactgggcagattcatgagatgcgtgcagagcgagacaaaggccgtgtctctgcaactgcctctgggaagaaacatggaacaccggttgaccatggacagcgccctgagcctgacaaagagagagggacccgagacactcaaaaagaaatacctggtccagcaccagatgaagtgtctgaccgccgtggattgtctgcaggctttttgggacatg

SEQ ID NO: 1103 - DNA, 4521 bp, Artificial Sequence
  polynucleotide 4B
atccagaagaagaagcagaagtccaacctggacctgcagcaccagcgcagacgcaaaaagaagaaggacaaggtcgagatccggaatcggagccccaaggccaatagcacagagtgtcagggcgagcacagcagagagcagaacctgctgaatctggtgcagctgaaccctcacagccctcaccacagaaaggacgaagaggaccaccagaagcggcaccaccaccacaatcaaaagaaaatgagcgtgatggccaagaagtcccagcagcctctcggacaggcctttggctctctgtgtcagctggtgtccgccgatttcagcgcccctcaagtgaccagactgcggagcctgaaccatctgctgatcaacgagggcaacaaccactggcctagagtggaaatgcctaccggttggctgctcgtgggctacaacaccagaaacacagcccagaatcctcggctgcagcagcacctgaaacactggcagcagtgcaccagagccagatggtgccaagagccttgtcagaccctgaccttcttccatttcttcttctttttcaaaacggtgtccctgtgctgccccggctggtctaaaggacaacctcctccacctggcctgaagccttctagcctggcttctcaggtggccagaaccacaggcgtgtaccagcacgtgtggctgatctgcttcgtgttcttcgtgtgcgtggaaaccggcttctgtcacgtggcccaagtgggactcgagagactggtgtctctgagcggcatcaccgacgtgaaccattgggcccagcctaagccatctcctagcaaaggcaccggcatgaacagacccatcggcctgagagttggcaaaggcgtgtgggccagactgagagcctccgtgtctttctggaccctgctgcctacaacaggcgtgcggacaagaggaagccctctgagactgacactgtggcctccacggaacatcctgaacagcctgcctagcagcatggaaatcgccgtgctgcaagagaaccgcaagaccagaaaggccgccagagagaagcacagaaagaccgacaacctgcacctgtgctactaccacagccagagcaaccggaacaagagccggcagatggaaagcctgggcatgaagctgcagagccctctgtgggattgctccaccacaacaggcacacaccacggctgtctgtgggagatccctagcgttacactgctggcctgcagagtgaacgccgtggaagaactgcacagcaggcggatgtctgtgcggatcgtgaagaactgggtgtcctgctgttacgtgcgcctgtctgctgtgggcctgtctacttggagcgccctggacgtggtcatcaacctgaagcggctgcagaagttcagccagaagtctcagcaccactgcgccctgagaaagatcgagtgggccacaaagctgagcctcggcggaaaagctggaccccaggctcaagagaaggccaacgccaagaagatgcccttccagcggtggatcttcagcaatcagctgaccgtgcagatgctgtgcctgcctattgaagccctgactgccctgttcacctgtcggacagccagcatcagcgtgaacatcagcaccctgatgagcatcctggaagcccctctgttttttcacggcgacctgtgcgaggaaaagaagaacggccggatcagcagccaggctcctctcagactttggtcttggtgcggcacaagccagacctactttggcagcaccgccaagaaaagccccaccagcttttgctgcgagtggggaggacaggctcaccggcagagaaataccggaatggaaatcctgctgtggattctgctcaagatggaaattcagatcttcaagatttgcctgggcgagatgcagctgtgcacctacacaccccacatctgcagacacacctgtagaggcggacctagcgccagcgatagatgctgtagctgtagccctagcggcttcagcgccggaagaggcagatgtccagttcagggatgtctgcggcctcacagagtgcagctgctgagaagatggggccctggatctcctgctggccagagactgtctaagggctttcagctgctccgttggtggggaccaggatctccagctcctgagcctagaaagggcccatttccaccacctgatcctccatggcctgtgaccgctgtgacagtgatggctggctctgtgcctagcgctcagtctgtggatgctctggaaagccctggacctctggcactggaaggacctagcagccccagaaacctgctctggcgggaaatgagcatcttcctgcctggcatcttcacctctcggattctgaacctgcaagtgctgaagaagatcctgcggagctttatgaagctgtaccactctctggtcatgtgcctgcggctgcggaccaagctggaaaaagctctgagcgctctgttcatctggccccagcacagctacaagcagaggcctcctctgcagcctgtgcaggtcgtgctcagactgggaaacctgcctccattcttcagaggcagcgaggtgccctttcctagaccttgccggaccaagatgctgaaccagaagtgtctggcccctttcatcacacacccattcgcctctcagcccctgggacaagagatgcccaacaacacccagatcagactgctgaagcccctgctgacccctgacaccagatggatcttctccaaccagctgcagacagtccagatgctctgtctgccacctctgaagcagggcgagagaatcatttggcccctcggcggctttcagatccccaacttcttttggagcctcggaatcggccacactggcgcctggtggcatactggaaggcggagaagagaatggggcggctccaccgtgtctagaagcccactgtggatcagctccatgatctacctgagaggcatggccttcgccagcgacagctccatcagaaccaccagagtgtcctggtgcagaagatgcggcgccaaatctgccgctgcctccagcctcaagaagaaaccccgggacatctgtcggatcagcgactctaagaagatgacccagaagcgcgagagcaccctgggcaatttctggatgaagctcctccagctgccagacaagaagaagaagtctaccgaaaagaccaagatcatcaagaagatgaagaaacggatcatggtccacatgtgcagctccctggctctgccaacaggcctgacatctctgatcctgccaagcagcgatctggccgtgctgatctctagctccaccagccactttctgatgcggagcccagtgctgcctagctccagactgacttgtgcctctccacagctgcccagaatgtggacctggtccagctggctgaagtggctgaaaaactggaagcggttcaagcttaaaaagaagtacatcctggccatgacgctgaccctgaacgggcatccaagaaccgcctctatcaccctgcctaccaccagcctgaagggctctagaaccagctgttgccccagatctcaccccagactgcctaggacaaagtggcctctgcagtgcctgctgcacagcctgggaacaactggaacactcgtgtgggaaaggggcgtgctgcagatgagaagtctggaagctcactgccctctgcagaccttccacctccaccactgtagaactcagcccagctcttgccctcctgcatggattctgtaccaaggacagtggagcggagccgtcgtgggacttagacctgtggctcaccatctgccaagacctattcagggcctgcactgcccacaggctccacatcaaccagctctgtcttggggcaagtggcccgtgggaatgacaggacctgccagatgttgccggtggcctagacgggaactcaaaaagaatctgctgctcccctgccggtgcagacgcgagtatagagtgacaatgggccaagccttcggcagctttagcgccgactttagcgctccccaggtgttgaagaagaatcggaagcagaacaagattatctgcaagggccaccgcatcacaagcctgatcctgagctttcagcgcgtgaaacttaagaagaaagtcaacgcctgctctcccgcctgcacctctaaagcctggactcccagaaagctcgtggggagagccgtcagaagaaagggcatcatctgtatcaagaatatgttcctgcagcggaagggtttcctgaacctgagccacgtggaaaagttcgtgcctccttctcctcctctggctctcggccctagaatgcagctctgtacccagctggcccggttcttccctatcacacctcctgtgtggcacatcctgggacctcagaggcacaccccttgtcaaaagaaggtgccctccgctagcccatggggccttagaccatctccttgcctgagctggtcctccagaattgtggcccctggacacgccctgagctgtcggactagaagaagatggtccagcaag

SEQ ID NO: 1104 - protein, 29 aa, Artificial Sequence
  hTPA amino acid sequence
MDAMKRGLCCVLLLCGAVFVSPSQEIHAR

SEQ ID NO: 1105 - protein, 232 aa, Artificial Sequence
  Human Invariant chain (hINV) amino acid sequence
MHRRRSRSCREDQKPVMDDQRDLISNNEQLPMLGRRPGAPESKCSRGALYTGFSILVTLLLAGQATTAYFLYQQQGRLDKLTVTSQNLQLENLRMKLPKPPKPVSKMRMATPLLMQALPMGALPQGPMQNATKYGNMTEDHVMHLLQNADPLKVYPPLKGSFPENLRHLKNTMETIDWKVFESWMHHWLLFEMSRHSLEQKPTDAPPKESLELEDPSSGLGVTKQDLGPVPM

SEQ ID NO: 1106 - protein, 11 aa, Artificial Sequence
  HA tag amino acid sequence
GYPYDVPDYAS

SEQ ID NO: 1107 - protein, 1547 aa, Artificial Sequence
  hTPA- and HA-extended poly-FSP polypeptide 1A
MDAMKRGLCCVLLLCGAVFVSPSQEIHARTEIQLTMNDSKHKLESPALKQVSPASPPTQQPQTPQDSRQVLALAKKTLTNASRAGQFPVWRRTSRGMSLQWKSGNACTPLRCPSRSPATFLTALNGWHRSGLRAQMPSSWSSSGRTLKLAPLQVTTTLKLILVMLEIVTERSLLYSRMCLVQIPTHTWEPDYFVSLPMMFSWATQSFPVGAVFLTRPAIPCCSCTSHSNPWSQSNQQLKWTPHILKSASFDKKGFVILSRRSKIEASPIGSIASSPGHPLGPTLAIRFISAPQPSSSTVTAAPSGQYFIAKKRIKLRRNNMGGNRSICLTRKRKREKRSQKSRQNHLQLKSCRRKISNWSKLRSPWIFTKCEICVKNTAILAITLITPQDPHLDPVCHPHRRPGWKGHHRVVFSHHPSGSTKSHWQQRERGGGRREKKGCREQRKVVKNPSQPVPLRNDGITNGNDSTRSCSISLKKSLEKMPLMRRARPTSCSTCRMWWKGKKRRKEIVPMSLACSITVSFVGQISTLVLDVSSISHWRLPCKVTESSSSFFYTSDRTPLSISRPTSRARQSCCLPGLTHPAHQPLGSMSTRREMPSQATPSPPGPWRAALGKEVKRSQSKLRLRNTSPGEKNDLQLFVMSDTTYKIYWTVILLNPCGNLHLKTTSLQRPPRSILSLNGIWEVMPRTLEGCISVKDHRTSQNHSKCITECVRTALNVSKKRLPKLMKKKDSTIFINKVRQNFKRNFKKKKPLTFSPSRRMTRRTMTTTKMMMMRRTKRRRRKRRRMTMMTRRTLLTKKTCLTPRTSAATKALPRQTISQRRPIQTPPGTSLAIWGRTRLTLTGTRSSGTRASPSAVCLCCWTCPSRSFPAASPSGLRAPVGAQAPPEVTLRASCASSASKACAGLWPWGAQVRVGAGTGGGPACVPVAEASTGAWTAEGAAGTRCRASRAPCRQLPASSPTKCEICVKRRRRRKRSSQSRSPVPKKRERMMLPVRARTARSALPQGRAPLEGMLLPRALPSLLSRMPARRESRFWLALQALGLRPPHLPSCHPLPQLLGPPPPHQAPMTLKALVKTWTQFRNYPRADKKNVRSTAFFLLDIILGDCPRTMAGPSASLHPASGRASRKTWQRRLRACRAGGPAGWARQAYPRLKTFGVPLGSILCLAGSLSTMMIISTTRQECGRRASVPCRPMIGSARPGPWRTSAMPSAMGVALPTSCESGRSPPATGGRMPGSQSIMMSWMPPLAPCAACPCSPAPTLCPAHPARAPTAVPAFTPLSAHPVPVLSGCHLAVRTSMLTLLPMEAKKSMKRSNAKKMEDMIWESRLPLRPQRGPRPLHRWLQQTTGCSQRRIVFFLAPYFPRHPHRSPPTSCPPLLEAFPLPRASLRATVPRHSSVLATGLHLHRQISLPLRGFLLHQPLPGQHLWLSHRLRLRLPRTQPSLPGPCASLLSTLSQPPPQAPSQVWTAATLRCPAVPAAACPPALRSMPKSRNQVLFRRNLTPSQLRTLAPPYMLLPQSLSQSLSRKQIPSQSMLVGYPYDVPDYAS

SEQ ID NO: 1108 - protein, 1541 aa, Artificial Sequence
  hTPA- and HA-extended poly-FSP polypeptide 2A
MDAMKRGLCCVLLLCGAVFVSPSQEIHARRKMQSLNHPSRLTNGSPPLHLCQPLRMSRTPPRRVCAAPPHRLLGPSRWNPRRKTWKMRKKYAQKPSQKNHLYGGKKRSKFSRSHLDFSPYWMKKVKVLFKADQSESSLSSGRCSLMEQIPHLKSRRKWQIRHVLKNLWLPMRSLGEPWRAGFQWGESPWQVMASLTGRATFLLALWECSLPQARLCLIVSRTLLLVQSRNKKTKLWFSLINIHHRKNPLLPMRWWCTRGGGKRKKKMCKVSGGCTACVERCPWKGICWKWPVTVAAIRMCALSHPSFYISSTVCFLSKHCMTACTRKRMKTGAIQEKGAIQEKGAMTKRICVVNFEACREMESLSAPEKITLFEAHMARCTSINVLCVRASLIEKLMKEKRKMKRNQVASPQIMQRLFIKGYQNNHFTFHLQNFAFFSSFGNNKYINILTILFHVRNIVYGIQVMLCASPQIMQRTSADRFRMKRRMQNLDNLGVPWPLLPGIPSLNAQWMFLRIASPQIMQRMSAVNFETIRARNRNMKKTMSHLIAHQALKMSGLRLFHPRLLTRKKPGKLLLAHMYGFSTYGTQKGECVCLQCLSGSSLFILKQPLDLKISKTFMGHREGSESDNLGLLYSFPPPYPISEGLTMTTGRNINSNSLMTNCLFSPIFLCHHAIMHRKMTSPHFRLFSSKIPHPQVPSVVALCKFRAFIHTPRSPGCSVYANMCWPKFFLTFSQQWSSVTSLEWTAQERGCSSWLMKQTWMKSWSLRDPSYRSILEYVSTRVLWMPTSTVLQAHPQVPALAPQAWWPARRGPLTSAPSAQQSLTREKIINPTISCPFQSPTKRLIYPPSTCSLPCRGFLPSRFPWGPPPLNSVIVHKIVLVFLKSLSSYNCERRISGIQKRAIEFAVLKLLNMDLPLENTQIPRTSPLWKITMVLTYPNCVVHVLMFGALRATAPATAAPQAQTPHWRAATTSSMSSSPRAEPTSSSSWATCWPRCCSSSCYWSLSSWPPAGAAEATNTRTRSRESQRGRMLTWRSSLWLQGTRCFTGVRTSSRYKKRGVIAWRRQINRRKLQRKKHWNSAYLGRTLLVTCILYHRWIVTSMCQSQRWLTSTTSRSSALMWTELSLEPWIPYLHQQKTQRTLESAGLFPWLHTQCQEKKSRKLMSSCTHPCTMLLPQGCHPAWLSPISACPRLLPYPFHVLALEVTFPPGTAMPQMQLQALAMWEKGWDKPGTSLQCYLNRRRNSRKQSQVQLAIQVLLVDKHKYFLFGQKKGHMIFSLANGLWFNLIFNSRKKLLEDMKQNGFTGKGLTHPVPLKRTLQNKRNKNIKRVNQKKGNIKRKSILLHLIVLNSPESNLILIQHGGIFTFRFWVEKLSWNICKNLSLYLDKFVQRLLYVYIIETNVFVLNLFHVPVNQIFMMAFYLKYTEKAWVMELEWLIQQQCYQGSCGRACSCGRGCGTPRGDWKRHPPRRAFWKPPSQGISSCLMTGCWLEKKATWMRRTRRKKREDHCGLRHPSWPWTRCLRMRPPRSGYPYDVPDYAS

SEQ ID NO: 1109 - protein, 1546 aa, Artificial Sequence
  hTPA- and HA-extended poly-FSP polypeptide 3A
MDAMKRGLCCVLLLCGAVFVSPSQEIHARGAAAASCQSPPSPRETTPSSDATRRTRPIAAQSKKTMTAAGLTPMIRKIQKRRRTANRCLRVRCGGWLCGWTPRGQNTRSTNLEKNPSLKKQSQRRGKLSSLFFSHCLCRNSRRATPTSKGSLRRKYLRVPIPPHLRHPLLLMDLDGMLTVIGQGLVGMTPRDLGTVAGATAQIQRPIQVQTGGRLTPPPLILWPQAAPVDPPGSVWILPCKNKKRRKLRPKRLDFHPRSSSGVSVITMKLWEKHFKGLNWNLVVWILNLKMMNIEITPQRSKARKSGVMKCWDLCPSEKKRKLPLPLTFSTLLWDSRHRGASSSTSRDSRSFFTSAHPSRPCRMRLYQFLIHLRKVDTHHLQVVTKTVTATTADGQRMRRLKCKACRLRWARPEPAAQAPPKSHFPPHPSGPSRTSSLQLRSIPHVPKATAAHSVTVKLQKGKNSPCCQKKLRVQNQGHLLMILLHNTYMEMHYGHQAPQVAMLPKLLCRQMLPTLSTLQQRHPQGPCPPPVTPLRVQSVLLLGVPQTAARQPSRPTGRTPTTRLMAPVGSVMSCSLLTQPSPASACTMPPLLHPQWAPHSAGLSPGACRPACTCISMTTISRATWQVSVYSGNLLSFSRRGMKSSVRLKNSRRNRRYRKIYGELKMSLQAVAPRCPRSAVDISPGPTSPSLASCASVAIGKLALLGASAPCGAAGAREAGRFAVLGTMVMKHLNRKLHLTRSCLIDLTMMMSQKLWKNQRKRIPLPSPRQHLLPQYPLHPPPPCLLLLHHRHHLAFLEMACSSQHTHSIKIWISFSHEQSSPFLARSWNTMQWNNKKMAMTVIAGAHHCQYKLTYTKVWKMNWKKMMIGSQHLLFSPLDSSPLQLLLHPHGKRCNPCCRLTWMSMLQKQCCYNLVIKHPLIFRINLRRQGKTKDGVVQSLGFLNQQIILQKEFFICLLMFIKRWKPAATKREWEKRKQILGGGGKYKEYFLKRILIRKAMTVLAGDKKGLGRFMRCVQSETKAVSLQLPLGRGPVYYVCNRMNVSSVLKPFLFTVPIEDMRECTLGRNRMNVSSVLKPCLIPVPIDLPRMLPISSPLHRPQMPFWTCTFPATTWGTWETPSTWGWRTFRGPRRKVLMVLWLPANQSLQKSQVFQWVLRTENIRKLIWTKQRSFLSLFPKLRATEQMTNVGCAFSGRILHQPEMAAMRLMPKFLNSTNSWWTCTNLSVPMMLTILIWKRVFILLLSDKKLLKKSSQLRRSWRNVSRISHQMKCLTAVDCLQAFWDMNMEHRLTMDSALSLTKREGPETCKKKLLLKLLTMSLSNILMKFRLRLRIPSLRKYRQHLKKTSAKGEKLKHCFKAWGRGPPLHTRSQKKDPAGKLKKLTTLSFVLIEERRNLQRNLKVLWLKKSTKSRYLFFLTVCGFFEKKRPEWLSSRKKGHTKNRRKAKRKPQIVHKKRGLFLKKKYLVQGAKKITFLSNGMEACGTHPTPRLSDRVFLVKITTTTSSPRRSPALRARGGTTIGEVTSLCFFYLLYGYPYDVPDYAS

SEQ ID NO: 1110 - protein, 1547 aa, Artificial Sequence
  HTPA- AND HA-EXTENDED POLY-FSP POLYPEPTIDE 4A
MDAMKRGLCCVLLLCGAVFVSPSQEIHARIQKKKQKSMAKKSQQPLVLKKNRKQEWGGQAHRQRNNAKKMPFQEEKKNGRISSSLILSFQRVKDSKKMTQKMCSSLALPTGLTSLILPSSDLAVLISSSTSHFLMRSPVLPSSRLTCASPQLPRMWTWSSWLKHPRTASITLPTTSLKGSRTSCCPRSHPRLPRTKWPLQCLLHSLGTTGTLVWERGVLQMRSLEAHCPLQTFHLHHCRTQPSSCPPAWILYQGQWSGAVVGLRPVAHHLPRPIQGLHCPQAPHQPALSWGKWPVGMTGPARCCRWPRRSQKSQHHCALRKIEWATKLSLGGKAGPQAQEKARPSPCLSWSSRIVAPGHALSCRTRRRWSSKCRGGPSASDRCCSCSPSGFSAGRGRCPVQGCLRPHRVQLLRRWGPGSPAGQRLSKGFQLLRWWGPGSPAPEPRKGPFPPPDPPWPVTAVTVMAGSVPSAQSVDALESPGPLALEGPSSPRNLLWREMSIFLPGIFCQKKVPSASPWGLVPPSPPLALGPRMQLCTQLARFFPITPPVWHILGPQRHTPQVVLRLGNLPPFFRGSEVPFPRPCRTKNEGNNHWPRVEMPTGWLLVGYNTRNTAQNPRLQQHLKHWQQCTRARWCQEPCQTLTFFHFFFFFKTVSLCCPGWSKGQPPPPGLKPSSLASQVARTTGVYQHVWLICFVFFVCVETGFCHVAQVGLERLVSLSGITDVNHWAQPKPSPSKGTGMNRPIGLRVGKGVWARLLKKKPRDICRISNRKTRKAAREKHRKTDRASVSFWTLLPTTGVRTRGSPLRLTLWPPRCRCRREYRVTMNILNSLPSSMEIAVLQETAKKSPTSFCCNLDLQHQRRRKKKKDKVEIRNRSPKANSTECQGEHSREQNLLNLVQLNPHSPHHRKDEEDHQKRHHHHNQKKMSVPLFFHGDLCRESTLGNFWMKLLQLPQRPPLQPVTGMEILLWILLKMEIQIFKICLGEMQLCTSRILNLQVLKKILRSFMKLYHSLVMCLRLRTKLEKALSALFIWPQHSYKITHPFASQPLGQEMPNNTQIRLLKPDKKKKSTEKTKGQAFGSFSADFSAPQGQAFGSLCQLVSADFSAPQVTRLRSLNHLLIWLKNWKRFKLKKKYQAPLRLWSWCGTSQTYFGSIICIKNMFLQRKGFLNLSHVEKFELKKNLLLPVVINLKRLQKFMLNQKCLAPFPACTSKAWTPRKLVGRAVRRKGILAMTLTLNGIEALTALFTCRTASISVNISTLMSILEAIIKKMKKRIMVHRWIFSNQLTVQMLCLPLLTPDTRWIFSNQLQTVQMLCLPPLKQGERIIWPLGGFQIPNFFWSLGIGHTGAWWHTGRRRREWGGSTVSRSPLWISSMIYLRGMAFASDSSIRTTRVSWCRRCGAKSAAASSSPLWDCSTTTGTHHGCLWEIPSVTLLANLHLCYYHSQSNRNKSRQMESLGMKLQLKKKVNACSTYTPHICRHTCRVNAVEELHSRRMSVRIVKNWVSCCYVRLSAVGLSTWSALDNKIICKGHRITGYPYDVPDYAS

SEQ ID NO: 1111 - protein, 1547 aa, Artificial Sequence
  hTPA- and HA-extended poly-FSP polypeptide 1B
MDAMKRGLCCVLLLCGAVFVSPSQEIHARTEIQLTMNDSKHKLESPALKQVSPASPPTQQPQTPQDSRQVLAMPSSWSSSGRTQRKVVKNPSQPVPLRNDGITNGNDSTRSCSISLKKSLEKMPLMMKKKDSTIFIVPMSLACSITVSFVGQISTLVLDVSSISHWNKVRQNFKRNADKKNVRSGEKNDLQLFVMSDTTYKIYWTVILLNPCGNLHLKTTSLGDCPRTMAGPSASLHPASGRASRKTWQRRLRACRAGGPAGWARQAFDKKGFVILSVGAGTGGGPACVPVAEASTGAWTAEGAAGTRCRASRAPCRQLPASSPTKCEICVKRRRRRKRSSQSRSPVPKKRERMMLPVRARTARSALPQGRAPLEGMLLPRALPSLLSRMPARRESRFWLALQALGLRPPHLPSCHPLPQLLGPPPPHQAPTAFFLLDIILRLPCKVTESSNMGGNRSICLTNAKKMEDMIWESTPLSISRPTSRARQSCCLPGLTHPAHQPLGSMTLAIRFISAPQPSSSTVTAAPSGQYFKGKKRRKEIFKKKKPLTFSPSLAKKTLTNSSFFYTSDREAKKSMKRSMTLKALVKTWTQFRNYPRASSPGHPLGPNGIWEVMPRTLEGCISVKDHRTSQNHSKCITECVRTALNRRSKIEASPIGSIALRSMPKSRNQVLFRRNLTPSQLRTLAPPYMLLPQSLSQSLSRKQIPSQSMLVASRAGQFPVWRRTSRGMSLQWKSGNACTPLRCPSRSPATFLTALNGWHRSGLRAQRKRKREKRSQKSRQNHLQLKSCRRKISNWSKLRSPWIFVSKKRLPKLTKCEICVKNTAILAITLITPQDPHLDPVCHPHRRPGWKGHHRVVFSHHPSGSTKSHWQQRERGGGRREKKGCRERSLLYSRMCLVQIPTHTWEPDYFVSLPMMFSWATQSFPVGAVFLTRPAIPCCSCTSHSNPWSQSRHPHRSPPTSCPPLLEAFPLPRASLRATVPRHSSVLATGLHLHRQISLPLRGFLLHQPLPGQHLWLSHRLRLRLPRTQRPPRSILSLRLPLRPQRGPRPLHRWLQQTTGCSQRRYPRLKTFGVPLGSILCLAGSLSTMMIISTTRQECGRRASVPCRPMIGSARPGPWRTSAMPSAMGVALPTSCESGRSPPATGGRMPGSQSIMMSWMPPLAPCAACPCSPAPTLCPAHPARAPTAVPAFTPLSAHPVPVLSGCHLAVRTSMLTLLPMLKLAPLQVTTTLKLILVMLEIVTESTRREMPSQATPSPPGPWRAALGKEVKRSQSKLRLRNTSPIVFFLAPYFPRRMTRRTMTTTKMMMMRRTKRRRRKRRRMTMMTRRTLLTKKTCLTPRTSAATKALPRQTISQRRPIQTPPGTSLAIWGNQQLKWTPHILKSASRRARPTSCSTCRMWWIAKKRIKLRRNRTRLTLTGTRSSGTRASPSAVCLCCWTCPSRSFPAASPSGLRAPVGAQAPPEVTLRASCASSASKACAGLWPWGAQVRQPSLPGPCASLLSTLSQPPPQAPSQVWTAATLRCPAVPAAACPPGYPYDVPDYAS

SEQ ID NO: 1112 - protein, 1541 aa, Artificial Sequence
  hTPA- and HA-extended poly-FSP polypeptide 2B
MDAMKRGLCCVLLLCGAVFVSPSQEIHARRKMQSLNHPSRLTNMSRTPPRRVCNPRRKTWKMRKKYAQKPSQKNHLYNSRKKLLEDMKQNGFTGHREGSESDNLGLLYSFPPIRMCALSHPSFYISSTVCFLSKHCMTACTQKKGHMIFSREKIINPTISCPFQSPTKRLELSLEPWIPYLHQQKTQGGKKRSKFPGTSLQCYLNRCSLMEQIPHLKSASPQIMQRTSADRFRMKRRMQNLDNLGVPWPLLPGPLENTQIPRTSPLWKITMVLTYPNCVVHVLMFWLPMRSLGEPWRAGFQWGESPWQVMASLTGPYPISEGLTMTTGRNINSNSLMTNCLFSPIFLCHHAIMHRKMTSPHFRLFSSKIPHPQVPSVVALCKFRATFLLALWECSLPQARLCLIVSRTLLLVQSAAPPHRLLGPSRWSRSHLDFSPYWMKKVKLANGLWFNLIFVLFKADQSESSLSSGRNKKTKLWFSLINIHHRKNPLLPMRIPSLNAQWMFLRILLLAHMYGFSTYGTQKGECVCLQCLSGSSLFILKQPLDLKISKTFMLQAHPQVPALAPQAWWPARRGPLTSAPSAQQSLTASPQIMQRMSAVNFETIIYPPSTCSLPCRGRTLESAGLFPWLHTQCTHPCTMLLPQGWWCTRGGGKRKKKMCKVSGGCTACVERCPWKGICWKWPVTVAAQWSSVTSLEWTAQERGCSSWLMKQTWMKSWSLRDPSYRSILEYVSTRVLWMPTSTVRRRNSRKQSQVQLAIQVLLVDKHKYFLFGRARNRNMKKTMSHLIAHQALKMSGLRLFHPRLLTRKKPGKFLPSRFPWGPPPLCHPAWLSPISACPRLLPYPFHVLALEVTFPPGTAMPQMQLQALAMWEKGWDKRKRMKTGAIQEKGAIQEKGAMTKRICVVNFEACREMESLSAPEKITLFEAHMARCTSINVLCVRASLIEKLMKEKRKMKRNQVASPQIMQRLFIKGYQNNHFTFHLQNFAFFSSFGNNKYINILTRRKKREDHCGLLILIQHGGIFTFRFWVEKLSWNICKNLSLYLDKFVQRLLYVYIIETNVFVLNLFHVPVNQIFMMAFYLKYTEKAWVMELEWLIQQQCYQQEKKSRKLMSSCRAFIHTPRSPGCSVYANMCWAFWKPPSQGISSCLMTGCWGSPPLHLCQPLRRYKKRGVIAWRRRKWQIRHVLKNLILFHVRNIVYGIQVMLCGKGLTHPVPLKRTLQNKRNKNIKRVNQKKGNIKRKSILLHLIVLNSPESNPKFFLTFSQLEKKATWMRRTGALRATAPATAAPQAQTPHWRAATTSSMSSSPRAEPTSSSSWATCWPRCCSSSCYWSLSSWPPAGAAEATNTRTRSRESQRGRMLTWRSSLWLQGTRCFTGVRTSSGSCGRACSCGRGCGTPRGDWKRHPPRRNSVIVHKIVLVFLKSLSSYNCERRISGIQKRAIEFAVLKLLNMDLHWNSAYLGRTLLVTCILYHRWIVTSMCQSQRWLTSTTSRSSALMWTRQINRRKLQRKKRHPSWPWTRCLRMRPPRSGYPYDVPDYAS

SEQ ID NO: 1113 - protein, 1546 aa, Artificial Sequence
  hTPA- and HA-extended poly-FSP polypeptide 3B
MDAMKRGLCCVLLLCGAVFVSPSQEIHARGAAAASCQSPPSPRETTPSSDATRRTRPIAAQSKKTMTAAGLTPKNKKRRKLRPKMIRKIQKRRRTANRRNSRRATPTSKGSLRRKYLRVRGPPLHTRNIRKLIWTKQRSFLSLFPKLRATEQMTNVGCSIPHVPKATAAHSVTVKLQLPLTFSTLLWDSRHTMSLSNILMKFRLQSSPFLARSWNTMQWNNKKMAMTVIAGAHHCQYKLTYTKVWKMNWKKMMIGSQHLLFSPLDSSPLQLLLHPHGKRCNPCCRLTWMSQNTRSTNLEKNPSLKKQSQRRGKLSAFSGRILHQPEMAAMRLMPKFLNSTNSWWTLTTLSFVLIEEARQPSRPTGRTPTTRLMAPVGSVMSCSLLTQPSPASACTMPPLLHPQWAPHSAGLSPGACRPACTCISMTTISRATWGPVYYVCNRMNVSSVLKPFLFTVPIEDMRECTLGRNRMNVSSVLKPCLIPVPISEKKRKLPNIEITPQRSKAMLQKQCCYNLVIKHPLIFRINLRRQGKTKDGVVQSLGFLNQQIILQKEFFICLLMFIKRWKPAATKSRKKGHTKNRRKAKRKPQIYLFFLTVCGFHLKKTSAKWLKKSTKSRSNGMEACGTHPTPRLSCLRVRCGGWLCGWTPRGRKSGVMKCWDLCPVHKKRGLFRLDFHPRSSSGKGKNSPCCQKKLRVQNQGHLLMILLHNDRVFLVKIGEKLKHCFKAWGSRRNRRYRKIYGELKMSLQAFLIHLRKVDTHHLQVVTKTVTATTADGQRMRRLKCKACRLRWARPEPAAQAPPKSHFPPHPSGPSRTSSLQLRSLFFSHCLCSQKKDPAGKLKKLLKKSSQLRRSWRNVSRISTPPPLILWPQAAPVSVITMKLWEKHFKGLNWNLVVWILNLKMMTYMEMHYGHQAPQVAMLPKLLCRQMLPTLSTLQQRHPQGPCPPPVTPLRVQSVLLLGVPQTARGPRRKVLMVLWLPANQSLQKSQVFQWVLRTEVAPRCPRSAVDISPGPTSPSLASCASVAIGKLALLGASAPCGAAGAREAGRFAVLGTMVMKLCFFYLLYRLRIPSLRKYRQHLNRKLHLTRSCLIDLTMMMSQKLWKNQRKRIPLPSPRQHLLPQYPLHPPPPCLLLLHHRHHLAFLEMACSSQHTHSIKIWISFSHEVDPPGSVWILPCDLPRMLPISSPLHRPQMPFWTCTFPATTWGTWETPSTWGWRTFRGASSSTSRDSRSFFTSAHPSRPCRMRLYQCKKKLLLKLLTTTTSSPRRSPALRARGGTTIGEVTSCTNLSVPMMLTILIWKRVFILLLSDKKGAKKITFLPIPPHLRHPLLLFEKKRPEWLSMDLDGMLTVIGQGLVGMTPRDLGTVAGATAQIQRPIQVQTGGRLRRNLQRNLKVLQVSVYSGNLLSFSRRGMKSSVRLKNREWEKRKQILGGGGKYKEYFLKRILIRKAMTVLAGDKKGLGRFMRCVQSETKAVSLQLPLGRNMEHRLTMDSALSLTKREGPETLKKKYLVQHQMKCLTAVDCLQAFWDMGYPYDVPDYAS

SEQ ID NO: 1114 - protein, 1547 aa, Artificial Sequence
  hTPA- and HA-extended poly-FSP polypeptide 4B
MDAMKRGLCCVLLLCGAVFVSPSQEIHARIQKKKQKSNLDLQHQRRRKKKKDKVEIRNRSPKANSTECQGEHSREQNLLNLVQLNPHSPHHRKDEEDHQKRHHHHNQKKMSVMAKKSQQPLGQAFGSLCQLVSADFSAPQVTRLRSLNHLLINEGNNHWPRVEMPTGWLLVGYNTRNTAQNPRLQQHLKHWQQCTRARWCQEPCQTLTFFHFFFFFKTVSLCCPGWSKGQPPPPGLKPSSLASQVARTTGVYQHVWLICFVFFVCVETGFCHVAQVGLERLVSLSGITDVNHWAQPKPSPSKGTGMNRPIGLRVGKGVWARLRASVSFWTLLPTTGVRTRGSPLRLTLWPPRNILNSLPSSMEIAVLQENRKTRKAAREKHRKTDNLHLCYYHSQSNRNKSRQMESLGMKLQSPLWDCSTTTGTHHGCLWEIPSVTLLACRVNAVEELHSRRMSVRIVKNWVSCCYVRLSAVGLSTWSALDVVINLKRLQKFSQKSQHHCALRKIEWATKLSLGGKAGPQAQEKANAKKMPFQRWIFSNQLTVQMLCLPIEALTALFTCRTASISVNISTLMSILEAPLFFHGDLCEEKKNGRISSQAPLRLWSWCGTSQTYFGSTAKKSPTSFCCEWGGQAHRQRNTGMEILLWILLKMEIQIFKICLGEMQLCTYTPHICRHTCRGGPSASDRCCSCSPSGFSAGRGRCPVQGCLRPHRVQLLRRWGPGSPAGQRLSKGFQLLRWWGPGSPAPEPRKGPFPPPDPPWPVTAVTVMAGSVPSAQSVDALESPGPLALEGPSSPRNLLWREMSIFLPGIFTSRILNLQVLKKILRSFMKLYHSLVMCLRLRTKLEKALSALFIWPQHSYKQRPPLQPVQVVLRLGNLPPFFRGSEVPFPRPCRTKMLNQKCLAPFITHPFASQPLGQEMPNNTQIRLLKPLLTPDTRWIFSNQLQTVQMLCLPPLKQGERIIWPLGGFQIPNFFWSLGIGHTGAWWHTGRRRREWGGSTVSRSPLWISSMIYLRGMAFASDSSIRTTRVSWCRRCGAKSAAASSLKKKPRDICRISDSKKMTQKRESTLGNFWMKLLQLPDKKKKSTEKTKIIKKMKKRIMVHMCSSLALPTGLTSLILPSSDLAVLISSSTSHFLMRSPVLPSSRLTCASPQLPRMWTWSSWLKWLKNWKRFKLKKKYILAMTLTLNGHPRTASITLPTTSLKGSRTSCCPRSHPRLPRTKWPLQCLLHSLGTTGTLVWERGVLQMRSLEAHCPLQTFHLHHCRTQPSSCPPAWILYQGQWSGAVVGLRPVAHHLPRPIQGLHCPQAPHQPALSWGKWPVGMTGPARCCRWPRRELKKNLLLPCRCRREYRVTMGQAFGSFSADFSAPQVLKKNRKQNKIICKGHRITSLILSFQRVKLKKKVNACSPACTSKAWTPRKLVGRAVRRKGIICIKNMFLQRKGFLNLSHVEKFVPPSPPLALGPRMQLCTQLARFFPITPPVWHILGPQRHTPCQKKVPSASPWGLRPSPCLSWSSRIVAPGHALSCRTRRRWSSKGYPYDVPDYAS

SEQ ID NO: 1115 - protein, 1750 aa, Artificial Sequence
  hINV- and HA-extended poly-FSP polypeptide 1A
MHRRRSRSCREDQKPVMDDQRDLISNNEQLPMLGRRPGAPESKCSRGALYTGFSILVTLLLAGQATTAYFLYQQQGRLDKLTVTSQNLQLENLRMKLPKPPKPVSKMRMATPLLMQALPMGALPQGPMQNATKYGNMTEDHVMHLLQNADPLKVYPPLKGSFPENLRHLKNTMETIDWKVFESWMHHWLLFEMSRHSLEQKPTDAPPKESLELEDPSSGLGVTKQDLGPVPMTEIQLTMNDSKHKLESPALKQVSPASPPTQQPQTPQDSRQVLALAKKTLTNASRAGQFPVWRRTSRGMSLQWKSGNACTPLRCPSRSPATFLTALNGWHRSGLRAQMPSSWSSSGRTLKLAPLQVTTTLKLILVMLEIVTERSLLYSRMCLVQIPTHTWEPDYFVSLPMMFSWATQSFPVGAVFLTRPAIPCCSCTSHSNPWSQSNQQLKWTPHILKSASFDKKGFVILSRRSKIEASPIGSIASSPGHPLGPTLAIRFISAPQPSSSTVTAAPSGQYFIAKKRIKLRRNNMGGNRSICLTRKRKREKRSQKSRQNHLQLKSCRRKISNWSKLRSPWIFTKCEICVKNTAILAITLITPQDPHLDPVCHPHRRPGWKGHHRVVFSHHPSGSTKSHWQQRERGGGRREKKGCREQRKVVKNPSQPVPLRNDGITNGNDSTRSCSISLKKSLEKMPLMRRARPTSCSTCRMWWKGKKRRKEIVPMSLACSITVSFVGQISTLVLDVSSISHWRLPCKVTESSSSFFYTSDRTPLSISRPTSRARQSCCLPGLTHPAHQPLGSMSTRREMPSQATPSPPGPWRAALGKEVKRSQSKLRLRNTSPGEKNDLQLFVMSDTTYKIYWTVILLNPCGNLHLKTTSLQRPPRSILSLNGIWEVMPRTLEGCISVKDHRTSQNHSKCITECVRTALNVSKKRLPKLMKKKDSTIFINKVRQNFKRNFKKKKPLTFSPSRRMTRRTMTTTKMMMMRRTKRRRRKRRRMTMMTRRTLLTKKTCLTPRTSAATKALPRQTISQRRPIQTPPGTSLAIWGRTRLTLTGTRSSGTRASPSAVCLCCWTCPSRSFPAASPSGLRAPVGAQAPPEVTLRASCASSASKACAGLWPWGAQVRVGAGTGGGPACVPVAEASTGAWTAEGAAGTRCRASRAPCRQLPASSPTKCEICVKRRRRRKRSSQSRSPVPKKRERMMLPVRARTARSALPQGRAPLEGMLLPRALPSLLSRMPARRESRFWLALQALGLRPPHLPSCHPLPQLLGPPPPHQAPMTLKALVKTWTQFRNYPRADKKNVRSTAFFLLDIILGDCPRTMAGPSASLHPASGRASRKTWQRRLRACRAGGPAGWARQAYPRLKTFGVPLGSILCLAGSLSTMMIISTTRQECGRRASVPCRPMIGSARPGPWRTSAMPSAMGVALPTSCESGRSPPATGGRMPGSQSIMMSWMPPLAPCAACPCSPAPTLCPAHPARAPTAVPAFTPLSAHPVPVLSGCHLAVRTSMLTLLPMEAKKSMKRSNAKKMEDMIWESRLPLRPQRGPRPLHRWLQQTTGCSQRRIVFFLAPYFPRHPHRSPPTSCPPLLEAFPLPRASLRATVPRHSSVLATGLHLHRQISLPLRGFLLHQPLPGQHLWLSHRLRLRLPRTQPSLPGPCASLLSTLSQPPPQAPSQVWTAATLRCPAVPAAACPPALRSMPKSRNQVLFRRNLTPSQLRTLAPPYMLLPQSLSQSLSRKQIPSQSMLVGYPYDVPDYAS

SEQ ID NO: 1116 - protein, 1744 aa, Artificial Sequence
  hINV- and HA-extended poly-FSP polypeptide 2A
MHRRRSRSCREDQKPVMDDQRDLISNNEQLPMLGRRPGAPESKCSRGALYTGFSILVTLLLAGQATTAYFLYQQQGRLDKLTVTSQNLQLENLRMKLPKPPKPVSKMRMATPLLMQALPMGALPQGPMQNATKYGNMTEDHVMHLLQNADPLKVYPPLKGSFPENLRHLKNTMETIDWKVFESWMHHWLLFEMSRHSLEQKPTDAPPKESLELEDPSSGLGVTKQDLGPVPMRKMQSLNHPSRLTNGSPPLHLCQPLRMSRTPPRRVCAAPPHRLLGPSRWNPRRKTWKMRKKYAQKPSQKNHLYGGKKRSKFSRSHLDFSPYWMKKVKVLFKADQSESSLSSGRCSLMEQIPHLKSRRKWQIRHVLKNLWLPMRSLGEPWRAGFQWGESPWQVMASLTGRATFLLALWECSLPQARLCLIVSRTLLLVQSRNKKTKLWFSLINIHHRKNPLLPMRWWCTRGGGKRKKKMCKVSGGCTACVERCPWKGICWKWPVTVAAIRMCALSHPSFYISSTVCFLSKHCMTACTRKRMKTGAIQEKGAIQEKGAMTKRICVVNFEACREMESLSAPEKITLFEAHMARCTSINVLCVRASLIEKLMKEKRKMKRNQVASPQIMQRLFIKGYQNNHFTFHLQNFAFFSSFGNNKYINILTILFHVRNIVYGIQVMLCASPQIMQRTSADRFRMKRRMQNLDNLGVPWPLLPGIPSLNAQWMFLRIASPQIMQRMSAVNFETIRARNRNMKKTMSHLIAHQALKMSGLRLFHPRLLTRKKPGKLLLAHMYGFSTYGTQKGECVCLQCLSGSSLFILKQPLDLKISKTFMGHREGSESDNLGLLYSFPPPYPISEGLTMTTGRNINSNSLMTNCLFSPIFLCHHAIMHRKMTSPHFRLFSSKIPHPQVPSVVALCKFRAFIHTPRSPGCSVYANMCWPKFFLTFSQQWSSVTSLEWTAQERGCSSWLMKQTWMKSWSLRDPSYRSILEYVSTRVLWMPTSTVLQAHPQVPALAPQAWWPARRGPLTSAPSAQQSLTREKIINPTISCPFQSPTKRLIYPPSTCSLPCRGFLPSRFPWGPPPLNSVIVHKIVLVFLKSLSSYNCERRISGIQKRAIEFAVLKLLNMDLPLENTQIPRTSPLWKITMVLTYPNCVVHVLMFGALRATAPATAAPQAQTPHWRAATTSSMSSSPRAEPTSSSSWATCWPRCCSSSCYWSLSSWPPAGAAEATNTRTRSRESQRGRMLTWRSSLWLQGTRCFTGVRTSSRYKKRGVIAWRRQINRRKLQRKKHWNSAYLGRTLLVTCILYHRWIVTSMCQSQRWLTSTTSRSSALMWTELSLEPWIPYLHQQKTQRTLESAGLFPWLHTQCQEKKSRKLMSSCTHPCTMLLPQGCHPAWLSPISACPRLLPYPFHVLALEVTFPPGTAMPQMQLQALAMWEKGWDKPGTSLQCYLNRRRNSRKQSQVQLAIQVLLVDKHKYFLFGQKKGHMIFSLANGLWFNLIFNSRKKLLEDMKQNGFTGKGLTHPVPLKRTLQNKRNKNIKRVNQKKGNIKRKSILLHLIVLNSPESNLILIQHGGIFTFRFWVEKLSWNICKNLSLYLDKFVQRLLYVYIIETNVFVLNLFHVPVNQIFMMAFYLKYTEKAWVMELEWLIQQQCYQGSCGRACSCGRGCGTPRGDWKRHPPRRAFWKPPSQGISSCLMTGCWLEKKATWMRRTRRKKREDHCGLRHPSWPWTRCLRMRPPRSGYPYDVPDYAS

SEQ ID NO: 1117 - protein, 1749 aa, Artificial Sequence
  hINV- and HA-extended poly-FSP polypeptide 3A
MHRRRSRSCREDQKPVMDDQRDLISNNEQLPMLGRRPGAPESKCSRGALYTGFSILVTLLLAGQATTAYFLYQQQGRLDKLTVTSQNLQLENLRMKLPKPPKPVSKMRMATPLLMQALPMGALPQGPMQNATKYGNMTEDHVMHLLQNADPLKVYPPLKGSFPENLRHLKNTMETIDWKVFESWMHHWLLFEMSRHSLEQKPTDAPPKESLELEDPSSGLGVTKQDLGPVPMGAAAASCQSPPSPRETTPSSDATRRTRPIAAQSKKTMTAAGLTPMIRKIQKRRRTANRCLRVRCGGWLCGWTPRGQNTRSTNLEKNPSLKKQSQRRGKLSSLFFSHCLCRNSRRATPTSKGSLRRKYLRVPIPPHLRHPLLLMDLDGMLTVIGQGLVGMTPRDLGTVAGATAQIQRPIQVQTGGRLTPPPLILWPQAAPVDPPGSVWILPCKNKKRRKLRPKRLDFHPRSSSGVSVITMKLWEKHFKGLNWNLVVWILNLKMMNIEITPQRSKARKSGVMKCWDLCPSEKKRKLPLPLTFSTLLWDSRHRGASSSTSRDSRSFFTSAHPSRPCRMRLYQFLIHLRKVDTHHLQVVTKTVTATTADGQRMRRLKCKACRLRWARPEPAAQAPPKSHFPPHPSGPSRTSSLQLRSIPHVPKATAAHSVTVKLQKGKNSPCCQKKLRVQNQGHLLMILLHNTYMEMHYGHQAPQVAMLPKLLCRQMLPTLSTLQQRHPQGPCPPPVTPLRVQSVLLLGVPQTAARQPSRPTGRTPTTRLMAPVGSVMSCSLLTQPSPASACTMPPLLHPQWAPHSAGLSPGACRPACTCISMTTISRATWQVSVYSGNLLSFSRRGMKSSVRLKNSRRNRRYRKIYGELKMSLQAVAPRCPRSAVDISPGPTSPSLASCASVAIGKLALLGASAPCGAAGAREAGRFAVLGTMVMKHLNRKLHLTRSCLIDLTMMMSQKLWKNQRKRIPLPSPRQHLLPQYPLHPPPPCLLLLHHRHHLAFLEMACSSQHTHSIKIWISFSHEQSSPFLARSWNTMQWNNKKMAMTVIAGAHHCQYKLTYTKVWKMNWKKMMIGSQHLLFSPLDSSPLQLLLHPHGKRCNPCCRLTWMSMLQKQCCYNLVIKHPLIFRINLRRQGKTKDGVVQSLGFLNQQIILQKEFFICLLMFIKRWKPAATKREWEKRKQILGGGGKYKEYFLKRILIRKAMTVLAGDKKGLGRFMRCVQSETKAVSLQLPLGRGPVYYVCNRMNVSSVLKPFLFTVPIEDMRECTLGRNRMNVSSVLKPCLIPVPIDLPRMLPISSPLHRPQMPFWTCTFPATTWGTWETPSTWGWRTFRGPRRKVLMVLWLPANQSLQKSQVFQWVLRTENIRKLIWTKQRSFLSLFPKLRATEQMTNVGCAFSGRILHQPEMAAMRLMPKFLNSTNSWWTCTNLSVPMMLTILIWKRVFILLLSDKKLLKKSSQLRRSWRNVSRISHQMKCLTAVDCLQAFWDMNMEHRLTMDSALSLTKREGPETCKKKLLLKLLTMSLSNILMKFRLRLRIPSLRKYRQHLKKTSAKGEKLKHCFKAWGRGPPLHTRSQKKDPAGKLKKLTTLSFVLIEERRNLQRNLKVLWLKKSTKSRYLFFLTVCGFFEKKRPEWLSSRKKGHTKNRRKAKRKPQIVHKKRGLFLKKKYLVQGAKKITFLSNGMEACGTHPTPRLSDRVFLVKITTTTSSPRRSPALRARGGTTIGEVTSLCFFYLLYGYPYDVPDYAS

SEQ ID NO: 1118 - protein, 1750 aa, Artificial Sequence
  hINV- and HA-extended poly-FSP polypeptide 4A
MHRRRSRSCREDQKPVMDDQRDLISNNEQLPMLGRRPGAPESKCSRGALYTGFSILVTLLLAGQATTAYFLYQQQGRLDKLTVTSQNLQLENLRMKLPKPPKPVSKMRMATPLLMQALPMGALPQGPMQNATKYGNMTEDHVMHLLQNADPLKVYPPLKGSFPENLRHLKNTMETIDWKVFESWMHHWLLFEMSRHSLEQKPTDAPPKESLELEDPSSGLGVTKQDLGPVPMIQKKKQKSMAKKSQQPLVLKKNRKQEWGGQAHRQRNNAKKMPFQEEKKNGRISSSLILSFQRVKDSKKMTQKMCSSLALPTGLTSLILPSSDLAVLISSSTSHFLMRSPVLPSSRLTCASPQLPRMWTWSSWLKHPRTASITLPTTSLKGSRTSCCPRSHPRLPRTKWPLQCLLHSLGTTGTLVWERGVLQMRSLEAHCPLQTFHLHHCRTQPSSCPPAWILYQGQWSGAVVGLRPVAHHLPRPIQGLHCPQAPHQPALSWGKWPVGMTGPARCCRWPRRSQKSQHHCALRKIEWATKLSLGGKAGPQAQEKARPSPCLSWSSRIVAPGHALSCRTRRRWSSKCRGGPSASDRCCSCSPSGFSAGRGRCPVQGCLRPHRVQLLRRWGPGSPAGQRLSKGFQLLRWWGPGSPAPEPRKGPFPPPDPPWPVTAVTVMAGSVPSAQSVDALESPGPLALEGPSSPRNLLWREMSIFLPGIFCQKKVPSASPWGLVPPSPPLALGPRMQLCTQLARFFPITPPVWHILGPQRHTPQVVLRLGNLPPFFRGSEVPFPRPCRTKNEGNNHWPRVEMPTGWLLVGYNTRNTAQNPRLQQHLKHWQQCTRARWCQEPCQTLTFFHFFFFFKTVSLCCPGWSKGQPPPPGLKPSSLASQVARTTGVYQHVWLICFVFFVCVETGFCHVAQVGLERLVSLSGITDVNHWAQPKPSPSKGTGMNRPIGLRVGKGVWARLLKKKPRDICRISNRKTRKAAREKHRKTDRASVSFWTLLPTTGVRTRGSPLRLTLWPPRCRCRREYRVTMNILNSLPSSMEIAVLQETAKKSPTSFCCNLDLQHQRRRKKKKDKVEIRNRSPKANSTECQGEHSREQNLLNLVQLNPHSPHHRKDEEDHQKRHHHHNQKKMSVPLFFHGDLCRESTLGNFWMKLLQLPQRPPLQPVTGMEILLWILLKMEIQIFKICLGEMQLCTSRILNLQVLKKILRSFMKLYHSLVMCLRLRTKLEKALSALFIWPQHSYKITHPFASQPLGQEMPNNTQIRLLKPDKKKKSTEKTKGQAFGSFSADFSAPQGQAFGSLCQLVSADFSAPQVTRLRSLNHLLIWLKNWKRFKLKKKYQAPLRLWSWCGTSQTYFGSIICIKNMFLQRKGFLNLSHVEKFELKKNLLLPVVINLKRLQKFMLNQKCLAPFPACTSKAWTPRKLVGRAVRRKGILAMTLTLNGIEALTALFTCRTASISVNISTLMSILEAIIKKMKKRIMVHRWIFSNQLTVQMLCLPLLTPDTRWIFSNQLQTVQMLCLPPLKQGERIIWPLGGFQIPNFFWSLGIGHTGAWWHTGRRRREWGGSTVSRSPLWISSMIYLRGMAFASDSSIRTTRVSWCRRCGAKSAAASSSPLWDCSTTTGTHHGCLWEIPSVTLLANLHLCYYHSQSNRNKSRQMESLGMKLQLKKKVNACSTYTPHICRHTCRVNAVEELHSRRMSVRIVKNWVSCCYVRLSAVGLSTWSALDNKIICKGHRITGYPYDVPDYAS

SEQ ID NO: 1119 - protein, 1750 aa, Artificial Sequence
  hINV- and HA-extended poly-FSP polypeptide 1B
MHRRRSRSCREDQKPVMDDQRDLISNNEQLPMLGRRPGAPESKCSRGALYTGFSILVTLLLAGQATTAYFLYQQQGRLDKLTVTSQNLQLENLRMKLPKPPKPVSKMRMATPLLMQALPMGALPQGPMQNATKYGNMTEDHVMHLLQNADPLKVYPPLKGSFPENLRHLKNTMETIDWKVFESWMHHWLLFEMSRHSLEQKPTDAPPKESLELEDPSSGLGVTKQDLGPVPMTEIQLTMNDSKHKLESPALKQVSPASPPTQQPQTPQDSRQVLAMPSSWSSSGRTQRKVVKNPSQPVPLRNDGITNGNDSTRSCSISLKKSLEKMPLMMKKKDSTIFIVPMSLACSITVSFVGQISTLVLDVSSISHWNKVRQNFKRNADKKNVRSGEKNDLQLFVMSDTTYKIYWTVILLNPCGNLHLKTTSLGDCPRTMAGPSASLHPASGRASRKTWQRRLRACRAGGPAGWARQAFDKKGFVILSVGAGTGGGPACVPVAEASTGAWTAEGAAGTRCRASRAPCRQLPASSPTKCEICVKRRRRRKRSSQSRSPVPKKRERMMLPVRARTARSALPQGRAPLEGMLLPRALPSLLSRMPARRESRFWLALQALGLRPPHLPSCHPLPQLLGPPPPHQAPTAFFLLDIILRLPCKVTESSNMGGNRSICLTNAKKMEDMIWESTPLSISRPTSRARQSCCLPGLTHPAHQPLGSMTLAIRFISAPQPSSSTVTAAPSGQYFKGKKRRKEIFKKKKPLTFSPSLAKKTLTNSSFFYTSDREAKKSMKRSMTLKALVKTWTQFRNYPRASSPGHPLGPNGIWEVMPRTLEGCISVKDHRTSQNHSKCITECVRTALNRRSKIEASPIGSIALRSMPKSRNQVLFRRNLTPSQLRTLAPPYMLLPQSLSQSLSRKQIPSQSMLVASRAGQFPVWRRTSRGMSLQWKSGNACTPLRCPSRSPATFLTALNGWHRSGLRAQRKRKREKRSQKSRQNHLQLKSCRRKISNWSKLRSPWIFVSKKRLPKLTKCEICVKNTAILAITLITPQDPHLDPVCHPHRRPGWKGHHRVVFSHHPSGSTKSHWQQRERGGGRREKKGCRERSLLYSRMCLVQIPTHTWEPDYFVSLPMMFSWATQSFPVGAVFLTRPAIPCCSCTSHSNPWSQSRHPHRSPPTSCPPLLEAFPLPRASLRATVPRHSSVLATGLHLHRQISLPLRGFLLHQPLPGQHLWLSHRLRLRLPRTQRPPRSILSLRLPLRPQRGPRPLHRWLQQTTGCSQRRYPRLKTFGVPLGSILCLAGSLSTMMIISTTRQECGRRASVPCRPMIGSARPGPWRTSAMPSAMGVALPTSCESGRSPPATGGRMPGSQSIMMSWMPPLAPCAACPCSPAPTLCPAHPARAPTAVPAFTPLSAHPVPVLSGCHLAVRTSMLTLLPMLKLAPLQVTTTLKLILVMLEIVTESTRREMPSQATPSPPGPWRAALGKEVKRSQSKLRLRNTSPIVFFLAPYFPRRMTRRTMTTTKMMMMRRTKRRRRKRRRMTMMTRRTLLTKKTCLTPRTSAATKALPRQTISQRRPIQTPPGTSLAIWGNQQLKWTPHILKSASRRARPTSCSTCRMWWIAKKRIKLRRNRTRLTLTGTRSSGTRASPSAVCLCCWTCPSRSFPAASPSGLRAPVGAQAPPEVTLRASCASSASKACAGLWPWGAQVRQPSLPGPCASLLSTLSQPPPQAPSQVWTAATLRCPAVPAAACPPGYPYDVPDYAS

SEQ ID NO: 1120 - protein, 1744 aa, Artificial Sequence
  hINV- and HA-extended poly-FSP polypeptide 2B
MHRRRSRSCREDQKPVMDDQRDLISNNEQLPMLGRRPGAPESKCSRGALYTGFSILVTLLLAGQATTAYFLYQQQGRLDKLTVTSQNLQLENLRMKLPKPPKPVSKMRMATPLLMQALPMGALPQGPMQNATKYGNMTEDHVMHLLQNADPLKVYPPLKGSFPENLRHLKNTMETIDWKVFESWMHHWLLFEMSRHSLEQKPTDAPPKESLELEDPSSGLGVTKQDLGPVPMRKMQSLNHPSRLTNMSRTPPRRVCNPRRKTWKMRKKYAQKPSQKNHLYNSRKKLLEDMKQNGFTGHREGSESDNLGLLYSFPPIRMCALSHPSFYISSTVCFLSKHCMTACTQKKGHMIFSREKIINPTISCPFQSPTKRLELSLEPWIPYLHQQKTQGGKKRSKFPGTSLQCYLNRCSLMEQIPHLKSASPQIMQRTSADRFRMKRRMQNLDNLGVPWPLLPGPLENTQIPRTSPLWKITMVLTYPNCVVHVLMFWLPMRSLGEPWRAGFQWGESPWQVMASLTGPYPISEGLTMTTGRNINSNSLMTNCLFSPIFLCHHAIMHRKMTSPHFRLFSSKIPHPQVPSVVALCKFRATFLLALWECSLPQARLCLIVSRTLLLVQSAAPPHRLLGPSRWSRSHLDFSPYWMKKVKLANGLWFNLIFVLFKADQSESSLSSGRNKKTKLWFSLINIHHRKNPLLPMRIPSLNAQWMFLRILLLAHMYGFSTYGTQKGECVCLQCLSGSSLFILKQPLDLKISKTFMLQAHPQVPALAPQAWWPARRGPLTSAPSAQQSLTASPQIMQRMSAVNFETIIYPPSTCSLPCRGRTLESAGLFPWLHTQCTHPCTMLLPQGWWCTRGGGKRKKKMCKVSGGCTACVERCPWKGICWKWPVTVAAQWSSVTSLEWTAQERGCSSWLMKQTWMKSWSLRDPSYRSILEYVSTRVLWMPTSTVRRRNSRKQSQVQLAIQVLLVDKHKYFLFGRARNRNMKKTMSHLIAHQALKMSGLRLFHPRLLTRKKPGKFLPSRFPWGPPPLCHPAWLSPISACPRLLPYPFHVLALEVTFPPGTAMPQMQLQALAMWEKGWDKRKRMKTGAIQEKGAIQEKGAMTKRICVVNFEACREMESLSAPEKITLFEAHMARCTSINVLCVRASLIEKLMKEKRKMKRNQVASPQIMQRLFIKGYQNNHFTFHLQNFAFFSSFGNNKYINILTRRKKREDHCGLLILIQHGGIFTFRFWVEKLSWNICKNLSLYLDKFVQRLLYVYIIETNVFVLNLFHVPVNQIFMMAFYLKYTEKAWVMELEWLIQQQCYQQEKKSRKLMSSCRAFIHTPRSPGCSVYANMCWAFWKPPSQGISSCLMTGCWGSPPLHLCQPLRRYKKRGVIAWRRRKWQIRHVLKNLILFHVRNIVYGIQVMLCGKGLTHPVPLKRTLQNKRNKNIKRVNQKKGNIKRKSILLHLIVLNSPESNPKFFLTFSQLEKKATWMRRTGALRATAPATAAPQAQTPHWRAATTSSMSSSPRAEPTSSSSWATCWPRCCSSSCYWSLSSWPPAGAAEATNTRTRSRESQRGRMLTWRSSLWLQGTRCFTGVRTSSGSCGRACSCGRGCGTPRGDWKRHPPRRNSVIVHKIVLVFLKSLSSYNCERRISGIQKRAIEFAVLKLLNMDLHWNSAYLGRTLLVTCILYHRWIVTSMCQSQRWLTSTTSRSSALMWTRQINRRKLQRKKRHPSWPWTRCLRMRPPRSGYPYDVPDYAS

SEQ ID NO: 1121 - protein, 1749 aa, Artificial Sequence
  hINV- and HA-extended poly-FSP polypeptide 3B
MHRRRSRSCREDQKPVMDDQRDLISNNEQLPMLGRRPGAPESKCSRGALYTGFSILVTLLLAGQATTAYFLYQQQGRLDKLTVTSQNLQLENLRMKLPKPPKPVSKMRMATPLLMQALPMGALPQGPMQNATKYGNMTEDHVMHLLQNADPLKVYPPLKGSFPENLRHLKNTMETIDWKVFESWMHHWLLFEMSRHSLEQKPTDAPPKESLELEDPSSGLGVTKQDLGPVPMGAAAASCQSPPSPRETTPSSDATRRTRPIAAQSKKTMTAAGLTPKNKKRRKLRPKMIRKIQKRRRTANRRNSRRATPTSKGSLRRKYLRVRGPPLHTRNIRKLIWTKQRSFLSLFPKLRATEQMTNVGCSIPHVPKATAAHSVTVKLQLPLTFSTLLWDSRHTMSLSNILMKFRLQSSPFLARSWNTMQWNNKKMAMTVIAGAHHCQYKLTYTKVWKMNWKKMMIGSQHLLFSPLDSSPLQLLLHPHGKRCNPCCRLTWMSQNTRSTNLEKNPSLKKQSQRRGKLSAFSGRILHQPEMAAMRLMPKFLNSTNSWWTLTTLSFVLIEEARQPSRPTGRTPTTRLMAPVGSVMSCSLLTQPSPASACTMPPLLHPQWAPHSAGLSPGACRPACTCISMTTISRATWGPVYYVCNRMNVSSVLKPFLFTVPIEDMRECTLGRNRMNVSSVLKPCLIPVPISEKKRKLPNIEITPQRSKAMLQKQCCYNLVIKHPLIFRINLRRQGKTKDGVVQSLGFLNQQIILQKEFFICLLMFIKRWKPAATKSRKKGHTKNRRKAKRKPQIYLFFLTVCGFHLKKTSAKWLKKSTKSRSNGMEACGTHPTPRLSCLRVRCGGWLCGWTPRGRKSGVMKCWDLCPVHKKRGLFRLDFHPRSSSGKGKNSPCCQKKLRVQNQGHLLMILLHNDRVFLVKIGEKLKHCFKAWGSRRNRRYRKIYGELKMSLQAFLIHLRKVDTHHLQVVTKTVTATTADGQRMRRLKCKACRLRWARPEPAAQAPPKSHFPPHPSGPSRTSSLQLRSLFFSHCLCSQKKDPAGKLKKLLKKSSQLRRSWRNVSRISTPPPLILWPQAAPVSVITMKLWEKHFKGLNWNLVVWILNLKMMTYMEMHYGHQAPQVAMLPKLLCRQMLPTLSTLQQRHPQGPCPPPVTPLRVQSVLLLGVPQTARGPRRKVLMVLWLPANQSLQKSQVFQWVLRTEVAPRCPRSAVDISPGPTSPSLASCASVAIGKLALLGASAPCGAAGAREAGRFAVLGTMVMKLCFFYLLYRLRIPSLRKYRQHLNRKLHLTRSCLIDLTMMMSQKLWKNQRKRIPLPSPRQHLLPQYPLHPPPPCLLLLHHRHHLAFLEMACSSQHTHSIKIWISFSHEVDPPGSVWILPCDLPRMLPISSPLHRPQMPFWTCTFPATTWGTWETPSTWGWRTFRGASSSTSRDSRSFFTSAHPSRPCRMRLYQCKKKLLLKLLTTTTSSPRRSPALRARGGTTIGEVTSCTNLSVPMMLTILIWKRVFILLLSDKKGAKKITFLPIPPHLRHPLLLFEKKRPEWLSMDLDGMLTVIGQGLVGMTPRDLGTVAGATAQIQRPIQVQTGGRLRRNLQRNLKVLQVSVYSGNLLSFSRRGMKSSVRLKNREWEKRKQILGGGGKYKEYFLKRILIRKAMTVLAGDKKGLGRFMRCVQSETKAVSLQLPLGRNMEHRLTMDSALSLTKREGPETLKKKYLVQHQMKCLTAVDCLQAFWDMGYPYDVPDYAS

SEQ ID NO: 1122 - protein, 1750 aa, Artificial Sequence
  hINV- and HA-extended poly-FSP polypeptide 4B
MHRRRSRSCREDQKPVMDDQRDLISNNEQLPMLGRRPGAPESKCSRGALYTGFSILVTLLLAGQATTAYFLYQQQGRLDKLTVTSQNLQLENLRMKLPKPPKPVSKMRMATPLLMQALPMGALPQGPMQNATKYGNMTEDHVMHLLQNADPLKVYPPLKGSFPENLRHLKNTMETIDWKVFESWMHHWLLFEMSRHSLEQKPTDAPPKESLELEDPSSGLGVTKQDLGPVPMIQKKKQKSNLDLQHQRRRKKKKDKVEIRNRSPKANSTECQGEHSREQNLLNLVQLNPHSPHHRKDEEDHQKRHHHHNQKKMSVMAKKSQQPLGQAFGSLCQLVSADFSAPQVTRLRSLNHLLINEGNNHWPRVEMPTGWLLVGYNTRNTAQNPRLQQHLKHWQQCTRARWCQEPCQTLTFFHFFFFFKTVSLCCPGWSKGQPPPPGLKPSSLASQVARTTGVYQHVWLICFVFFVCVETGFCHVAQVGLERLVSLSGITDVNHWAQPKPSPSKGTGMNRPIGLRVGKGVWARLRASVSFWTLLPTTGVRTRGSPLRLTLWPPRNILNSLPSSMEIAVLQENRKTRKAAREKHRKTDNLHLCYYHSQSNRNKSRQMESLGMKLQSPLWDCSTTTGTHHGCLWEIPSVTLLACRVNAVEELHSRRMSVRIVKNWVSCCYVRLSAVGLSTWSALDVVINLKRLQKFSQKSQHHCALRKIEWATKLSLGGKAGPQAQEKANAKKMPFQRWIFSNQLTVQMLCLPIEALTALFTCRTASISVNISTLMSILEAPLFFHGDLCEEKKNGRISSQAPLRLWSWCGTSQTYFGSTAKKSPTSFCCEWGGQAHRQRNTGMEILLWILLKMEIQIFKICLGEMQLCTYTPHICRHTCRGGPSASDRCCSCSPSGFSAGRGRCPVQGCLRPHRVQLLRRWGPGSPAGQRLSKGFQLLRWWGPGSPAPEPRKGPFPPPDPPWPVTAVTVMAGSVPSAQSVDALESPGPLALEGPSSPRNLLWREMSIFLPGIFTSRILNLQVLKKILRSFMKLYHSLVMCLRLRTKLEKALSALFIWPQHSYKQRPPLQPVQVVLRLGNLPPFFRGSEVPFPRPCRTKMLNQKCLAPFITHPFASQPLGQEMPNNTQIRLLKPLLTPDTRWIFSNQLQTVQMLCLPPLKQGERIIWPLGGFQIPNFFWSLGIGHTGAWWHTGRRRREWGGSTVSRSPLWISSMIYLRGMAFASDSSIRTTRVSWCRRCGAKSAAASSLKKKPRDICRISDSKKMTQKRESTLGNFWMKLLQLPDKKKKSTEKTKIIKKMKKRIMVHMCSSLALPTGLTSLILPSSDLAVLISSSTSHFLMRSPVLPSSRLTCASPQLPRMWTWSSWLKWLKNWKRFKLKKKYILAMTLTLNGHPRTASITLPTTSLKGSRTSCCPRSHPRLPRTKWPLQCLLHSLGTTGTLVWERGVLQMRSLEAHCPLQTFHLHHCRTQPSSCPPAWILYQGQWSGAVVGLRPVAHHLPRPIQGLHCPQAPHQPALSWGKWPVGMTGPARCCRWPRRELKKNLLLPCRCRREYRVTMGQAFGSFSADFSAPQVLKKNRKQNKIICKGHRITSLILSFQRVKLKKKVNACSPACTSKAWTPRKLVGRAVRRKGIICIKNMFLQRKGFLNLSHVEKFVPPSPPLALGPRMQLCTQLARFFPITPPVWHILGPQRHTPCQKKVPSASPWGLRPSPCLSWSSRIVAPGHALSCRTRRRWSSKGYPYDVPDYAS

SEQ ID NO: 1123 - DNA, 4641 bp, Artificial Sequence
  Polynucleotide encoding the hTPA- and HA-extended poly-FSP polypeptide 1A
atggatgcaatgaagagagggctctgctgtgtgctgctgctgtgtggagcagtcttcgtttcgcccagccaggaaatccatgcccgaaccgagatccagctgaccatgaacgacagcaagcacaagctggaaagccccgctctgaaacaggtgtcaccagcctctccacctactcagcagcctcagacacctcaggattctagacaggtgctggccctggccaagaaaaccctgacaaatgcctccagagccggacagtttcctgtgtggcggagaacaagcagaggcatgagcctgcagtggaagtccggcaatgcctgcacacctctgagatgccctagcagaagccctgccacattcctgacagccctgaatggctggcacagatctggcctgagagcccagatgcctagctcttggtctagcagcggcagaacactgaagctggcccctctgcaagtgaccaccactctgaagctgatcctggtcatgctggaaatcgtgaccgagcgctccctgctgtactccagaatgtgtctggtgcagatccccacacacacctgggagcccgattacttcgtgtccctgcctatgatgttcagctgggccacacagtcttttcccgtgggcgccgtgtttctgaccagacctgccattccttgctgcagctgtaccagccacagcaacccttggagccagagcaatcagcagctgaagtggacccctcacatcctgaagtccgccagcttcgacaagaaaggcttcgtgatcctgagccggcggagcaagattgaggcctctcctatcggctctatcgccagctctcctggacatcctctgggacctacactggccatcagattcatcagcgcccctcagcctagcagctctacagtgacagctgcccctagcggccagtactttatcgccaagaagcggatcaagctgcggcggaacaatatgggcggcaacagatccatctgcctgaccagaaagcgcaagagagagaagcggagccagaagtccaggcagaaccatctgcagctgaaaagctgcagacggaagatcagcaactggtccaagctgagaagcccctggatcttcaccaagtgcgagatctgcgtgaagaacaccgccatcctggctatcaccctgatcacccctcaggaccctcatctggaccctgtgtgtcaccctcatagaaggcctggatggaagggccaccatagagtggtgttctctcaccatcctagcggcagcacaaagagccactggcagcaaagagaacgcggaggcggcagacgcgagaagaagggatgtagagaacagcggaaggtggtcaagaacccctctcagcccgtgcctctgagaaacgatggcatcaccaacggcaacgactccaccagaagctgctccatcagcctgaagaaaagcctggaaaagatgcccctgatgcggagagccagacctaccagctgtagcacctgtagaatgtggtggaagggcaagaaacggcggaaagaaatcgtgcctatgagcctggcctgcagcatcaccgtgtcttttgtgggacagatcagcaccctggtgctggatgtgtctagcatcagccattggcggctgccctgtaaagtgaccgagagcagctccagcttcttctacaccagcgacaggacccctctgagcatcagcagaccaaccagcagagctagacagagctgttgtctgcccggactgacacaccctgctcaccaacctctgggcagcatgagcactagaagagagatgccaagccaggccacaccttctccacctggaccttggagagccgctctgggcaaagaagtgaagagatcccagagcaagctgcgcctgagaaacacaagccctggggagaagaacgatctccagctgttcgtgatgagcgacaccacctacaagatctactggacagtgatcctgctgaacccctgcggcaacctgcacctgaaaacaacatcactgcagcggccacctcggagcatcctgtctctgaatggaatctgggaagtgatgccccggacactggaaggctgcatcagcgtgaaggatcacagaaccagccagaaccacagcaagtgcatcaccgaatgtgtgcggactgccctgaacgtgtccaagaagagactgcctaagctgatgaagaagaaggacagcaccatcttcatcaacaaagtgcgccagaacttcaagcgcaacttcaagaagaagaaacccctcactttcagccccagcagacggatgactcggagaaccatgacaaccaccaaaatgatgatgatgcggcggaccaagcggagaaggcgcaaaaggcggagaatgaccatgatgaccagacggaccctgctgacaaagaaaacctgtctgacccctagaaccagcgccgccacaaaagctctgcctagacagaccatcagccagcggaggcctattcagaccccacctggaacatctctggccatctggggcagaacaagactgaccctgacaggcaccagatccagcggaacaagagcctctccttccgccgtgtgcctgtgttgttggacctgtccaagcagaagcttcccagccgcttctcctagtggactgagagcacctgttggagcccaggctcctcctgaagtgacactgagagcctcttgtgcctctagcgcctctaaagcctgtgctggactttggccttggggagcccaagttcgagttggagctggaacaggcggaggacctgcttgtgttcctgtggctgaagcttctacaggcgcatggacagctgaaggcgccgctggaacaagatgtagagcctctagagccccttgccgccaacttcctgctagctcccctaccaagtgtgaaatttgtgtgaagcgcagacggcggagaaagagaagcagccagtctagaagccccgtgcctaaaaagcgcgagaggatgatgctgcctgtgcgggccagaacagctagatctgcacttcctcagggcagagcacctctggaagggatgctgcttcctagagcactgcctagcctgctgagcagaatgcctgccagaagagagtcccggttttggctggctctgcaggcacttggactcagacctccacatctgcctagctgtcatcctctgcctcaactgttgggccctccacctcctcatcaggccccaatgacactgaaggccctggttaagacctggacacagttccgcaactaccccagagccgacaagaagaatgtccggtctaccgccttcttcctgctggacatcatcctgggcgattgcccaagaacaatggccggaccttctgcctctctgcatcctgcatctggcagagcctccagaaagacctggcagagaaggctgagagcttgtagagcaggcggacctgctggatgggctagacaggcctatcctagactgaaaaccttcggcgtgcccctgggctctattctgtgtctggccggcagcctgtccacaatgatgatcattagcaccaccagacaagagtgcggcaggcgggcttctgtgccttgtagacctatgatcggaagcgccagaccaggaccttggcggacatctgctatgcctagtgccatgggagtcgccctgcctacctcttgtgaaagcggaagatctcctcctgccaccggcggaagaatgccaggatctcagtctatcatgatgagctggatgcctccactggctccatgtgccgcttgtccatgttctcccgctcctacactgtgcccagcacatcctgctagagcaccaacagccgtgcctgcctttacacctctgtctgctcatcctgtgccagtgctgtctggatgtcacctggccgtcagaacctccatgctgacactgctgcccatggaagccaaaaagagcatgaagcggtccaacgctaagaaaatggaagatatgatctgggagagccggctgccactgaggccacaaagaggacctagacctctgcacagatggctgcagcagacaaccggctgtagccagaggcggatcgtgttctttctggccccatacttccctcggcaccctcacagatctccaccaacatcttgcccacctctgctggaagctttcccactgccaagagcttctctgagggccacagtgccaagacatagctctgttctcgccaccggtctgcacctccacagacagatttctctgcccctgagaggattcctcctgcaccaaccactgccaggacagcatctgtggctgtctcacagactgaggctgagactgcccaggacacagccatctttgcctggaccatgtgcaagcctgctgtccacactgtctcagccaccacctcaggctccatctcaagtgtggactgccgctacactgagatgtcctgctgttcctgcagctgcctgtcctcctgctctgagatccatgcctaagagccggaaccaggtgctgttcagacggaatctgaccccaagccagctgagaacactggccccaccttatatgctgctgccccagtctctgtcccagagcctgagtagaaagcagatccctagccagtccatgctcgtgggctacccctacgatgtccctgactatgcgtcc

SEQ ID NO: 1124 - DNA, 4623 bp, Artificial Sequence
  Polynucleotide encoding the hTPA- and HA-extended poly-FSP polypeptide 2A
atggatgcaatgaagagagggctctgctgtgtgctgctgctgtgtggagcagtcttcgtttcgcccagccaggaaatccatgcccgaagaaagatgcagagcctgaatcaccccagcagactgaccaatggctctcctccactgcacctgtgccagcctctgagaatgagcagaacccctcctagaagagtgtgcgccgctcctccacatagactgctgggcccttccagatggaaccctcggagaaagacctggaagatgcggaagaagtacgcccagaagcctagccagaagaaccacctgtacggcggcaagaagcgctctaagttcagcagaagccacctggacttcagcccctactggatgaagaaagtgaaggtgctgttcaaggccgaccagagcgagtctagcctgagcagcggaagatgcagcctgatggaacagatccctcacctgaagtctcggcggaagtggcagatcagacacgtgctgaagaacctgtggctgcccatgagaagcctgggagaaccttggagagccggctttcagtggggagagtctccttggcaagtgatggcctctctgaccggcagagccacatttctgctggccctttgggaatgtagcctgcctcaggcaagactgtgcctgatcgtgtctagaaccctgctgctggtgcagagccggaacaagaaaacaaagctgtggttcagcctgatcaacatccaccaccggaagaacccactgctgcctatgagatggtggtgtaccagaggcggcggaaagcggaaaaagaaaatgtgcaaggtgtccggcggctgcaccgcctgtgttgagagatgtccttggaagggcatctgctggaagtggcctgtgacagtggccgccattagaatgtgtgccctgtctcaccctagcttctacatcagcagcaccgtgtgctttctgagcaagcactgcatgaccgcctgcaccagaaagagaatgaagaccggcgccatccaagagaagggcgctattcaagagaaaggggccatgaccaagcggatctgcgtggtcaatttcgaggcctgcagagagatggaaagcctgagcgcccctgagaagatcaccctgtttgaagcccacatggcccggtgcacctccatcaatgtgctgtgtgtgcgggccagcctgattgagaagctgatgaaagaaaagcgcaagatgaagcggaaccaggtggcctctccacagatcatgcagcggctgttcatcaagggctaccagaacaaccacttcaccttccatctgcaaaacttcgccttcttcagctccttcggcaacaacaagtacatcaatatcctgaccatcctgttccacgtgcggaacatcgtgtacggcatccaagtgatgctgtgcgctagccctcagattatgcagagaaccagcgccgaccggttccggatgaagagaagaatgcagaatctggacaacctgggcgtgccatggcctctgttgcctggaatcccatctctgaacgcccagtggatgttcctgagaatcgcatccccgcaaatcatgcagaggatgagcgccgtgaacttcgagacaatccgggccagaaaccggaacatgaagaaaaccatgagccacctgatcgcccatcaggccctgaagatgagcggcctgagactgtttcaccccagactgctgacacggaagaagcccggaaaactgctgctcgcccatatgtacggcttcagcacctacggcacccagaaaggcgagtgcgtttgtctgcagtgtctgagcggcagcagcctgttcattctgaagcagcccctggacctgaagatcagcaagaccttcatgggccacagagagggcagcgagtctgataatctgggcctgctgtatagcttccctccaccttatcctatcagcgagggcctgaccatgaccaccggcagaaacatcaacagcaactccctgatgaccaactgcctgttcagccccatcttcctgtgccaccacgccatcatgcacagaaagatgacaagccctcacttcaggctgttcagcagcaagatcccacatcctcaggtgccatctgtggtggccctgtgcaagttccgggccttcatccacacacctagaagccctggctgcagcgtgtacgccaatatgtgctggcccaagttcttcctgaccttcagccagcagtggtccagcgtgacatctctggaatggacagcccaagagagaggctgcagcagctggctgatgaagcagacatggatgaagtcttggagcctgcgggaccccagctacagatccatcctggaatacgtgtccaccagagtgctgtggatgcctacctctaccgtgctgcaggctcatccacaagttccagctctggctcctcaagcctggtggcctgctagaagaggacctctgacatctgccccatccgctcagcagtccctgaccagagagaagattatcaaccccaccatcagctgcccctttcagagccccaccaagagactgatctaccctcctagcacctgttctctgccctgcagaggcttcctgcctagcagatttccttggggcccacctcctctgaacagcgtgatcgtgcacaagatcgtgctggtgttcctgaagtccctgtccagctacaactgcgagcggagaatcagcggcatccagaagagagccatcgagttcgccgtgctgaaactgctgaatatggacctgcctctcgagaacacacagatccccagaacaagcccactgtggaagatcacaatggtgctgacataccccaactgcgtggtgcatgtgctgatgtttggcgccctgagagccacagctcctgctacagctgcacctcaggctcagacccctcattggagagctgccacaacaagcagcatgagcagcagccctagagccgagcctacatcttctagctcttgggccacctgttggcccagatgctgctccagctcttgttactggtcactgtctagctggcctccagctggcgccgctgaagctacaaataccagaaccagaagccgcgagagccagaggggtagaatgctgacttggagaagctccctgtggttgcagggcaccagatgttttacaggcgtgcggaccagctccagatacaagaaaagaggcgtgatcgcctggcggagacagatcaatagacggaagctgcagagaaagaagcactggaacagcgcctacctgggcagaacactgctggtcacctgtatcctgtatcaccggtggatcgtgacctccatgtgtcagtcccagagatggctgaccagcaccacaagtagatctagcgccctgatgtggaccgagctgagcctggaaccatggattccctacctgcatcagcagaaaacccagcggacactggaatccgccggactgtttccttggctgcacacccagtgccaagagaagaaaagcagaaagctgatgtccagctgcacacacccctgcacaatgctgctgccacagggatgtcatcctgcctggctgagccctatctctgcctgtccaagactgctgccatatccttttcacgtgctggctctggaagtgacctttcctcctggaaccgccatgcctcagatgcagttgcaggctctggctatgtgggagaaaggctgggataagcctggcaccagcctgcagtgctacctgaacagaagaagaaacagccggaagcagagccaggtgcaactggccattcaggtgctgctcgtggacaagcacaagtactttctgttcggccaaaagaaaggccacatgatctttagcctggccaacggcctgtggtttaacctgattttcaactcccggaagaaactgctcgaggacatgaagcaaaatggcttcaccggcaaaggcctgacacaccccgtgcctctgaagcggactctgcagaacaaaagaaacaagaatatcaaacgcgtcaaccagaagaagggcaacatcaagcggaagtccatcctgctgcacctgattgtgctgaatagccccgagagcaacctgatcctgatccagcatggcggcatcttcacctttcggttctgggtcgagaagctgtcctggaacatctgcaagaacctgagcctgtacctggacaagttcgtgcagagactgctgtacgtgtacatcatcgagacaaacgtgttcgtgctgaacctgtttcatgtgcccgtgaaccagatcttcatgatggccttctacctgaagtacaccgagaaggcctgggtcatggaactggaatggctgatccaacagcagtgctatcagggcagctgcggcagagcttgttcttgtggaagaggctgtggcacccctagaggcgattggaagagacatcctcctcggagagccttctggaagcctcctagccagggcatctctagctgtctgatgaccggctgttggctcgagaagaaagctacctggatgcggcggacccgccggaagaagagggaagatcattgcggactgagacaccccagctggccttggacaagatgtctgaggatgaggcctccaagaagcggctacccctacgatgtccctgactatgcgtcc

SEQ ID NO: 1125 - DNA, 4638 bp, Artificial Sequence
  Polynucleotide encoding the hTPA- and HA-extended poly-FSP polypeptide 3A
atggatgcaatgaagagagggctctgctgtgtgctgctgctgtgtggagcagtcttcgtttcgcccagccaggaaatccatgcccgaggagctgctgctgcctcttgtcagtctcctccttctcctcgggaaaccacacctagctccgacgccaccagacggacaagacctattgccgctcagagcaagaaaaccatgacagccgccggactgacccctatgatccggaagatccagaagcggcggagaaccgccaaccggtgtctgagagttagatgtggcggctggctgtgtggctggacacctagaggacagaacaccagaagcaccaacctggaaaagaaccccagcctgaagaagcagagccagcggagaggaaagctgagcagcctgttcttcagccactgcctgtgccggaacagcagaagggccacacctacatctaagggcagcctgcggcggaagtacctgagagtgcctattcctccacacctgagacaccctctgctgctgatggacctggacggaatgctgaccgtgatcggacagggactcgtgggcatgacccctagagatctgggaacagtggctggcgccaccgctcagattcagaggcctattcaggtgcagaccggcggcagacttacacctcctcctctgattctgtggcctcaggccgctcctgttgatcctcctggctctgtgtggattctgccctgcaagaacaagaagcggagaaagctgcggcccaagcggctggactttcaccctagatcttctagcggcgtgtccgtgatcaccatgaagctgtgggagaagcacttcaagggcctgaactggaacctggtcgtctggattctgaacctgaagatgatgaacatcgagatcacccctcagcggagcaaggccagaaagtccggcgtgatgaagtgctgggatctgtgccccagcgagaagaagaggaagctgcctctgcctctgaccttcagcaccctgctgtgggactctagacatagaggcgccagctccagcaccagcagagactccagaagctttttcaccagcgctcaccccagcagaccctgcagaatgagactgtaccagttcctgatccacctgagaaaggtggacacccaccatctgcaggtcgtgaccaagaccgtgacagccacaacagctgacggccagagaatgcggagactgaagtgcaaggcctgccggctgagatgggctagacctgaacctgctgctcaggcccctccaaagagccactttccacctcatcctagcggccctagcagaaccagttctctgcagctgcggagcatccctcacgtgccaaaagccacagccgctcacagcgtgacagtgaagctgcagaagggaaagaacagcccctgctgccaaaagaaactgcgggtgcagaatcagggccatctgctgatgatcctgctgcacaatacctacatggaaatgcactacggccatcaggccccacaggtggccatgctgcctaagctgctgtgcagacagatgctgcccactctgagcacactgcagcaaagacacccacagggcccttgtcctccacctgtgacaccactgagagtccagtctgtcctgctgctgggagtgcctcagacagctgctagacagcctagcagacccaccggcagaacccctaccacaagactgatggcccctgtcggcagcgtgatgagctgttctctgctgacccagccttctccagccagcgcctgtacaatgcctccactgctgcatcctcagtgggccccacattctgctggattgtctcccggcgcttgcagacctgcctgtacctgtatcagcatgaccaccatctccagagccacctggcaggtttccgtgtacagcggcaatctgctgagcttctccagacggggcatgaagagtagcgtgcggctgaaaaacagccggcggaacagacggtacagaaagatctacggcgagctgaagatgtccctgcaggccgtggctcctagatgtcctagatctgccgtggacatcagccccggacctacctctcctagcctggcctcttgtgcctctgtggccattggaaaactggccctgcttggcgcttctgccccttgtggtgctgctggcgctagagaggctggaagatttgccgtgctgggcaccatggtcatgaagcacctgaaccgcaagctgcatctgacccggtcctgcctgatcgatctgaccatgatgatgagccagaagctctggaagaaccagcggaagagaatccctctgccatctcctagacagcatctgctccctcagtaccctctgcaccctcctccaccttgtctgctgctgctccaccacagacaccacctggcctttctggaaatggcctgcagcagccagcacacccactccatcaagatctggatcagctttagccacgagcagagcagcccattcctggccagatcctggaacaccatgcagtggaacaacaagaaaatggccatgacagtgatcgctggcgcccaccactgtcagtacaagctgacctacaccaaagtgtggaagatgaattggaagaaaatgatgatcggctcccagcacctcctgttcagccctctggatagctctccactgcaactgctgcttcaccctcacggcaagagatgcaacccttgctgcagactgacatggatgtccatgctgcagaaacagtgctgctacaacctcgtgatcaagcacccactgatcttcagaatcaacctgcggagacagggcaagaccaaggatggcgttgtgcagagcctgggcttcctgaaccagcagatcatcctgcagaaagagttcttcatctgcctgctcatgtttatcaagcggtggaagcctgccgccaccaagagagagtgggagaaacgcaagcagatcctcggcggaggcggcaagtacaaagagtacttcctgaagcgcatcctgattcggaaggccatgactgtgctggccggcgacaagaaaggcctgggcagattcatgagatgcgtgcagagcgagacaaaggccgttagcctgcagctcccactcggaagaggccctgtgtactacgtgtgcaaccggatgaacgtgtccagcgtgctgaagcccttcctgttcaccgtgcctatcgaggacatgagagagtgcacactgggccgcaacagaatgaatgtgtcctctgtgctgaaaccctgtctgatccctgtgccaatcgacctgcctcggatgctgccaatcagcagcccactgcacagaccccagatgccattctggacctgcacctttcctgccacaacatggggcacctgggagacaccttctacatggggctggcggacctttcggggccctagaagaaaagtgctgatggtgctgtggctgcccgccaaccagagtctgcagaaaagccaagtgttccagtgggtcctgcggaccgagaacatccggaagctgatctggaccaagcagcggagcttcctgtctctgttccccaagctgagagccaccgaacagatgaccaatgtgggctgcgccttcagcggccggattctgcatcaacctgaaatggccgccatgcggctgatgcccaagttcctgaatagcaccaacagctggtggacctgtaccaacctgagcgtgcccatgatgctgaccattctgatttggaagcgggtgttcattctcctgctgtccgacaagaagctgctgaagaagtctagccagctgaggcggtcttggagaaacgtgtcccggatcagccaccagatgaagtgtctgaccgccgtggactgtctgcaggccttctgggacatgaacatggaacaccggctgaccatggacagcgccctgagcctgacaaagagagagggacccgagacttgcaagaagaagctcctgctgaaactgctgacaatgagcctgagcaacatcctgatgaagttccggctgcggctgagaatcccaagcctgaggaagtatcgccagcatctgaaaaagaccagcgccaagggcgagaagctgaagcactgctttaaggcttggggcagaggcccacctctgcacacaagaagccagaagaaagaccctgccggcaagctgaaaaaactgaccacactgagcttcgtgctgatcgaggaacggcggaacctgcagcggaatctgaaagtcctgtggctcaagaaaagcaccaagagccggtatctgttcttcctgaccgtgtgcggcttcttcgagaagaaacggcctgagtggctgtcctccagaaagaagggacacacaaagaatcggaggaaggccaagcggaagccccagatcgtgcacaagaagagaggcctgttcctcaaaaagaaatacctggtgcagggcgccaagaagatcaccttcctgtccaacggcatggaagcttgcggcacacaccccacaccaagactgagcgacagagtgttcctggtcaagatcaccaccaccacaagcagccccagaagaagcccagcactgagagctagaggcggcaccacaattggcgaagtgaccagcctgtgcttcttctacctgctgtacggctacccctacgatgtccctgactatgcgtcc

SEQ ID NO: 1126 - DNA, 4641 bp, Artificial Sequence
  Polynucleotide encoding the hTPA- and HA-extended poly-FSP polypeptide 4A
atggatgcaatgaagagagggctctgctgtgtgctgctgctgtgtggagcagtcttcgtttcgcccagccaggaaatccatgcccgaatccagaagaagaaacagaaatccatggccaagaagtcccagcagcctctggtgctgaagaagaaccggaagcaagagtggggaggacaggcccacagacagagaaacaacgccaagaagatgcccttccaagaggaaaagaagaacggccggatcagcagcagcctgatcctgagcttccagagagtgaaggacagcaagaaaatgacccagaagatgtgcagctctctggccctgcctacaggcctgacatctctgatcctgcctagcagcgatctggccgtgctgatctctagcagcaccagccactttctgatgcggagccctgtgctgccaagctccagactgacatgtgcctctccacagctgccccggatgtggacatggtctagctggctgaagcaccccagaaccgctagcatcacactgcctaccacaagcctgaagggcagcagaaccagctgctgcccaagatctcaccccagactgcctaggaccaagtggcctctgcagtgtctgctgcacagcctgggaacaacaggcacactcgtttgggaaaggggcgtgctgcagatgagaagcctcgaagcccattgtcctctgcagaccttccatctgcaccactgcagaacccagccaagctcttgtcctcctgcctggattctgtaccaaggccagtggagcggagccgtcgttggacttagacccgtggctcaccatctgcctagacctatccagggcctgcactgtcctcaggctcctcatcaacctgctctgagctggggaaagtggcccgtgggaatgacaggacctgccagatgctgtcggtggccccgcagatctcagaagtctcagcatcactgcgccctgcggaagatcgagtgggccacaaaactgtctctcggcggaaaagccggaccacaggctcaagagaaggccagaccttctccttgcctgtcctggtccagcagaattgtggcccctggacacgccctgagctgtcggactcgtagaagatggtcctccaagtgcagaggcggccctagcgccagcgatagatgttgtagctgtagccccagcggcttcagcgccggaagaggcagatgtcctgtgcagggatgtctgaggccacacagagttcagctgctgagaagatggggcccaggatctcctgctggccagagactgtctaagggcttccaactgctgcgttggtggggacctggatctccagctcctgagcctagaaagggcccatttcctccacctgatcctccatggcctgtgaccgctgtgacagtgatggctggctctgtgcctagcgcacagtctgtggatgccctggaatctcctggacctctggctctggaaggccctagcagccctagaaacctgctgtggcgggaaatgagcatctttctgcccggcatcttctgccaaaagaaggtgccatctgccagcccctggggacttgttcctccttctccaccactcgctctgggccctagaatgcagctgtgtacccagctcgccagattcttccccatcacacctccagtgtggcacatcctgggacctcagagacacacacctcaggtggtcctgagactgggcaacctgcctccattcttcagaggcagcgaggtgccctttcctagaccttgccggaccaagaacgagggcaacaatcactggcccagagtggaaatgcctaccggctggctgctcgtgggctacaacaccagaaacacagcccagaatcctcggctgcagcagcatctgaaacactggcagcagtgcacacgggccagatggtgtcaagagccttgtcagaccctgaccttcttccacttcttcttctttttcaaaacggtgtccctgtgttgtcccggctggtccaaaggacaacctccacctcctggcctgaagccttctagcctggcttctcaggtggccagaaccacaggcgtgtaccagcacgtgtggctgatctgcttcgtgttcttcgtgtgcgtggaaaccggcttctgtcacgtggcacaagtgggcctcgagagactggtttctctgagcggcatcaccgacgtgaaccattgggcccagcctaagccatctcctagcaaaggcaccggcatgaacagacccatcggcctgagagttggcaaaggcgtgtgggccagactgctcaagaagaagcctagagacatctgtcggatctccaacagaaagacccggaaggccgccagagagaagcaccgcaaaacagatagagccagcgtgtccttctggactctgctgcctacaacaggcgtgcggacaagaggaagccctctgagactgactctgtggcctcctagatgcagatgcagacgcgagtacagagtgaccatgaacatcctgaacagcctgccaagcagcatggaaatcgccgtgctgcaagaaaccgccaagaaaagccctaccagcttctgctgcaacctggacctgcagcatcagcgcagacgcaaaaagaagaaagacaaggtcgagatccggaatcggagccccaaggccaatagcacagagtgtcagggcgagcacagcagagagcagaatctgctgaatctggtgcagctgaatcctcacagccctcaccaccggaaggacgaagaggaccaccagaagagacaccaccaccacaatcaaaagaagatgagcgtcccactgttcttccacggcgacctgtgtagagagagcaccctgggcaatttctggatgaagctgctccagctgcctcagaggcctccactgcaaccagtgaccggaatggaaatcctgctttggattctgctgaagatggaaattcagatcttcaagatttgcctgggcgagatgcagctctgcacctctcggattctgaacctgcaagtgctgaaaaagatcctgcggagctttatgaagctgtaccacagcctcgtgatgtgcctgcggctgaggaccaagctggaaaaggctctgagcgccctgttcatctggcctcagcactcctacaagatcacacacccattcgccagccagccactgggacaagagatgcccaacaacacccagatccggctgctgaagcccgacaagaagaagaaaagcaccgaaaagaccaaaggccaggctttcggcagcttctccgccgatttttcagcccctcaaggacaggcttttggctccctgtgtcagctggtgtccgccgactttagcgccccacaagtgaccagactgcggagcctgaaccatctgctgatttggctgaagaattggaagcggttcaagctcaaaaagaaatatcaggcccctctgcggctgtggtcttggtgcggaacaagccagacctacttcggcagcatcatctgtatcaagaatatgttcctgcagcggaagggtttcctgaacctgagccacgtggaaaagttcgagcttaagaagaatcttctgctccccgtcgtgatcaacctgaagagactgcagaaattcatgctgaaccagaagtgcctggctccatttcctgcctgcaccagcaaagcctggacacccagaaaactcgtgggcagagccgtgcggagaaagggcattctggccatgacactgaccctgaacggaatcgaggccctgacagccctgtttacctgtagaaccgcctccatcagcgtgaacatcagcaccctgatgagcatcctggaagccatcatcaagaagatgaagaaacggatcatggtgcaccggtggatcttctccaatcagctgaccgtgcagatgctctgcctgcctctgctgacccctgacaccagatggatctttagtaatcagctgcagacagtgcaaatgctgtgtctgccacctctgaagcagggcgagagaatcatttggccactcggcggctttcagatccccaatttcttctggtccctcggcatcggacacactggcgcatggtggcatactggtagaaggcggagagagtggggcggctctaccgtgtctagaagcccactgtggatcagctccatgatctacctgagaggcatggccttcgccagcgacagctccatcagaaccaccagagtgtcctggtgtcggagatgtggcgccaagtctgccgcagcctcttcttctccactgtgggattgcagcaccacaaccggcacacaccacggatgcctgtgggagatccctagcgttaccctgctggctaacctgcacctgtgctactaccactctcagagcaacagaaacaagagccgccagatggaatccctgggcatgaagctccaacttaaaaagaaagtgaacgcctgcagcacctacacaccccacatctgcagacacacctgtcgcgtgaacgccgtcgaggaactgcactctagaaggatgtccgtgcggatcgtgaaaaattgggtgtcctgctgctacgtgcggctgtcagctgtgggactgtctacttggagcgctctggacaacaagatcatctgcaagggccacagaatcaccggctacccctacgatgtccctgactatgcgtcc

SEQ ID NO: 1127 - DNA, 4641 bp, Artificial Sequence
  Polynucleotide encoding the hTPA- and HA-extended poly-FSP polypeptide 1B
atggatgcaatgaagagagggctctgctgtgtgctgctgctgtgtggagcagtcttcgtttcgcccagccaggaaatccatgcccgaaccgagatccaattgaccatgaacgacagcaagcacaagctggaaagccccgctctgaaacaggtgtcaccagcctctccacctactcagcagcctcagacacctcaggatagcagacaggtgctggccatgcctagcagctggtctagctctggcagaacccagcggaaggtggtcaagaatcctagccagcctgtgcctctgagaaacgacggcatcaccaacggcaacgactccaccagaagctgcagcatcagcctgaagaaaagcctggaaaagatgcccctcatgatgaagaagaaggacagcaccatcttcatcgtgcccatgagcctggcctgtagcatcaccgtgtctttcgtgggccagatcagcacactggtgctggatgtgtccagcatctcccactggaacaaagtgcggcagaacttcaagcggaacgccgacaagaagaacgttcggagcggcgagaagaacgacctgcagctgtttgtgatgagcgacaccacctacaagatctactggaccgtgatcctgctgaacccctgcggcaatctgcacctgaaaaccaccagcctgggcgactgtcctagaacaatggccggaccttctgcctctctgcaccctgcatctggcagagcctctagaaagacctggcagagaaggctgagagcctgtagagctggtggacctgctggatgggccagacaggccttcgataagaaaggctttgtgatcctgagcgtcggagccggaacaggcggaggacctgcttgtgttcctgtggctgaagcttctacaggcgcttggacagctgaaggcgccgctggaacaagatgtagagcttctagagccccttgcagacagctgcctgccagctctcctaccaagtgcgagatctgcgtgaagcgcagacggcggagaaagagaagcagccagtctagaagccccgtgcctaagaaacgcgagagaatgatgctgcccgtgcgggccagaacagctagatctgcacttcctcaggggagagcccctcttgagggaatgctgcttcctagagcactgcccagcctgctgtctagaatgccagccagaagagagagccggttttggctggctctgcaggcacttggactcagacctccacatctgcctagctgtcatcctctgcctcaactgcttggccctccacctcctcatcaggcccctacagctttcttcctgctggacatcattctgcggctgccctgcaaagtgaccgagtctagcaatatgggcggcaacagatccatctgcctgaccaacgccaagaaaatggaagatatgatctgggagagcacgcccctgagcatcagcagacctacatctagagccaggcagagctgttgtctgcccggactgacacatcctgctcaccagccactgggatctatgaccctggccatcagattcatcagcgctcctcagcctagctccagcacagtgacagctgctcctagcggccagtacttcaagggcaagaagcggcggaaagagatcttcaagaagaagaaacccctgacattcagccccagcctggccaaaaagaccctgaccaatagcagcttcttctacaccagcgaccgcgaggccaagaaatctatgaagcggagcatgaccctgaaggccctggtcaagacctggacacagttcagaaactaccccagagcctcctctcctggacaccctctgggacctaatggcatctgggaagtgatgcccagaacactggaaggctgcatctccgtgaaggaccacagaacaagccagaaccacagcaagtgcatcaccgagtgtgtgcggacagccctgaacagaagaagcaagatcgaggcctctcctatcggctctatcgccctgagatccatgcctaagagcagaaaccaggtgctgttcagacggaatctgaccccaagccagctgagaactctggcccctccttatatgctgctgccccagtctctgagccagagcctgagcagaaagcagatccctagccagtccatgctggtggcctctagagcaggacagtttcctgtgtggcggagaaccagcagaggaatgagcctgcagtggaagtccggcaatgcctgcacacctctgagatgccctagcagaagccctgccacattcctgacagctctgaacggctggcacagatctggactgagagcccagagaaagcgcaagcgcgagaagagaagccagaagtccaggcagaaccatctgcagctgaagtcctgccggcgcaagatctccaactggtccaagctgagaagcccctggatcttcgtgtccaagaagagactgcccaagctgaccaagtgtgaaatctgtgtcaagaacaccgccatcctggctatcaccctgatcacccctcaggaccctcatctggaccctgtgtgtcaccctcatagaaggcctggatggaagggccaccacagagtggtgttttctcatcaccctagcggcagcaccaagagccactggcagcaaagagaacgcggaggcggcagacgggaaaagaagggctgtagagagagatccctgctgtactccagaatgtgcctggtgcagatccccacacacacctgggagcccgattacttcgtgtctctgcccatgatgttcagctgggccacacagtcattccccgtgggagccgtgtttctgaccagacctgccattccttgctgtagctgcacaagccacagcaacccttggagtcagagcagacacccacacagaagcccacctacctcttgtcctccgctgctggaagcctttccactgcctagagcatccctgagagccaccgtgccaagacatagctctgtgctggcaaccggactgcatctgcacagacagatttctctgcccctgagaggattcctgctgcatcaaccactgccaggccagcatctgtggctgtctcatagactgcggctgagactgccaagaactcagcggcctcctagatccatcctgagccttagactgccactgaggccacagagaggacccagacctctgcatagatggctgcagcagaccacaggctgtagccagagaagataccccagactgaaaaccttcggcgtgccactgggctccattctgtgtctggctggatctctgagcaccatgatgatcattagcaccaccagacaagagtgtggcaggcgggcatctgtgccctgtagacctatgatcggaagcgccagaccaggaccttggagaacatctgctatgcctagcgccatgggcgtcgcactgcctacaagctgtgaatccggaagatctcctcctgccaccggcggaagaatgcctggaagccagagcattatgatgagctggatgcctcctctggctccttgtgccgcttgtccttgttctcccgctcctacactgtgtcccgctcatcctgctagagcacctacagccgtgcctgcctttacacctctgtctgcacatcctgtgcctgtgctgtctggatgtcacctggccgtcagaacctccatgctgacactgctgcctatgctgaagctggccccactgcaagtgaccaccacactgaagctgatcctggtcatgctggaaatcgtgaccgagagcactcggagagagatgccttctcaggccacaccttctccacctggaccttggcgagccgctctgggcaaagaagtgaagagatcccagagcaagctgcgcctgagaaacacaagccccatcgtgttctttctggccccatacttccccagacggatgaccagacggaccatgacaaccaccaaaatgatgatgatgcggcggaccaagcggagaaggcgcaaaaggcggagaatgacaatgatgacaaggcggaccctgctgacaaagaaaacctgtctgacccctagaaccagcgccgctaccaaagctctgccaaggcagacaatctcccagcggaggcctattcagacccctcctggaacatctctggccatctggggcaaccagcagctgaaatggacccctcacatcctgaagtccgccagcagaagggccagacctaccagctgtagcacctgtagaatgtggtggatcgccaaaaagcggatcaagctgcggcggaacagaaccagactgacactgacaggcacaagaagcagcggcaccagagcttctccatccgccgtttgcctgtgttgctggacctgtccttccagaagcttcccagccgcttctccaagcggattgagagcacctgttggagcacaggcccctccagaagttacactgagagctagctgtgcctccagcgcctctaaggcttgtgctggactttggccttggggagcacaagttcggcaaccatctttgcctggaccatgcgcttctctgctgagcacactgtctcagccacctccacaggctccatctcaagtgtggacagccgcaacactgagatgtcctgctgttccagctgctgcctgtcctcctggctacccctacgatgtccctgactatgcgtcc

SEQ ID NO: 1128 - DNA, 4623 bp, Artificial Sequence
  Polynucleotide encoding the hTPA- and HA-extended poly-FSP polypeptide 2B
atggatgcaatgaagagagggctctgctgtgtgctgctgctgtgtggagcagtcttcgtttcgcccagccaggaaatccatgcccgaagaaagatgcagagcctgaatcaccccagcagactgaccaacatgagcagaacacctccaagacgcgtgtgcaaccctcggagaaagacctggaagatgcggaagaagtacgcccagaagcctagccagaagaaccacctgtacaacagccggaagaaactgctcgaggacatgaagcagaatggcttcacaggccacagagagggcagcgagtctgataatctgggcctgctgtactcctttcctcctatccggatgtgcgccctgtctcaccctagcttctacatcagcagcaccgtgtgctttctgagcaagcactgcatgaccgcctgcacacaaaagaaaggccacatgatcttcagccgcgagaagatcatcaaccccaccatcagctgcccctttcagagccccacaaagcggctggaactgagcctggaaccttggattccctacctgcaccagcagaaaacccaaggcggcaagaagagaagcaagttccctggcaccagcctgcagtgctacctgaacagatgcagcctgatggaacagatccctcacctgaagtccgcctctccacagatcatgcagagaaccagcgccgaccggttccggatgaagcggagaatgcagaacctggacaatctgggcgttccatggccactgctgcctggacctctggaaaacacacagatccccagaacaagccctctgtggaagatcacaatggtgctgacataccccaactgcgtggtgcacgtgctgatgttctggctgcctatgagatctctgggcgagccttggagagctggctttcagtggggagagtccccttggcaagtgatggctagcctgacaggcccctatcctatcagcgagggcctgaccatgaccaccggcagaaacatcaacagcaactccctgatgaccaactgcctgttcagccccatcttcctgtgccaccacgccatcatgcaccggaagatgacaagcccacacttcagactgttcagcagcaagatcccacatcctcaggtgccatctgtggtggccctgtgcaagttcagagccacatttctgctcgccctgtgggagtgtagtctgcctcaagccagactgtgcctgatcgtgtctagaaccctgctgctggttcagtctgccgctcctccacatagactgctgggcccttctagatggtccagaagccacctggacttcagcccctactggatgaagaaagtgaagctggccaacggcctgtggttcaacctgatcttcgtgctgttcaaggccgaccagagcgagtctagcctgtctagcggccggaacaagaaaacaaagctgtggttctccctcatcaacatccaccaccgcaagaatcctctgctgcccatgagaatccccagcctgaatgcccagtggatgttcctgagaatcctgcttctggcccatatgtacggcttcagcacctacggcacccagaaaggcgagtgcgtttgtctgcagtgtctgagcggcagcagcctgttcattctgaagcagcccctggacctgaagatctccaagaccttcatgctgcaagctcacccacaggtgccagctcttgctcctcaagcttggtggcctgctagaagaggccctctgacatctgctccatccgctcagcagtctctgacagctagccctcagattatgcagcggatgagcgccgtgaacttcgagacaatcatctaccctccaagcacctgtagcctgccttgtagaggcagaacactggaaagcgccggactgtttccttggctgcacacccagtgtacacacccctgtaccatgctgctgccacaaggctggtggtgtacaagaggcggcggaaagcggaaaaagaaaatgtgcaaggtgtccggcggctgcaccgcctgtgttgagagatgtccttggaagggcatctgctggaagtggccagtgacagtggctgctcagtggtctagcgtgacctctctggaatggacagcccaagagagaggctgcagcagctggctgatgaagcaaacatggatgaagtcttggtccctgcgggaccccagctacagatccatcctggaatacgtgtccaccagagtgctgtggatgcccacaagcaccgtgcggagaagaaacagcagaaagcagtctcaggtgcagctggccattcaggtgctgctcgtggacaagcacaagtactttctgttcggcagagcccgcaaccggaacatgaagaaaaccatgagccacctgatcgcccatcaggccctgaagatgagcggcctgaggctgtttcatcctcggctgctgacaagaaagaagcccggcaagttcctgcctagcagatttccttggggccctcctcctctgtgtcatcctgcttggctgagccctatctccgcctgtccaagactgctgccatatccttttcacgtgctggccctggaagtgacctttccacctggaacagccatgcctcagatgcaactgcaggccctggccatgtgggagaaaggctgggataagcggaagagaatgaagaccggcgccatccaagagaagggcgctattcaagagaaaggggccatgaccaagcggatctgcgtggtcaatttcgaggcctgcagagagatggaaagcctgagcgcccctgagaagattaccctgtttgaagcccatatggcccggtgcacctccatcaatgtgctgtgtgtcagagcctctctgatcgagaagctgatgaaagaaaagcgcaagatgaagcgcaaccaggtggcatccccacaaattatgcagaggctgttcattaagggctaccagaacaaccacttcaccttccatctgcaaaacttcgccttcttcagcagcttcggcaacaacaagtacatcaatatcctgacgcggcgcaagaaaagagaggaccactgcggactgctgatcctgatccagcacggcggcatcttcacctttcggttctgggtcgaaaagctgagctggaacatctgcaagaacctgagcctgtacctggataagttcgtgcagcggctgctgtacgtgtacatcatcgagacaaacgtgttcgtgctgaacctgttccacgtgccagtgaaccagatcttcatgatggccttctacctgaagtacaccgagaaggcctgggtcatggaactggaatggctgatccaacagcagtgttaccagcaagagaagaaaagccggaaactgatgagcagctgccgggccttcatccacacacctagaagccctggctgcagcgtgtacgccaatatgtgctgggccttttggaagcctcctagccagggcatcagctcttgtctgatgacaggctgttggggcagccctcctctgcacctgtgtcagcctctgaggcggtataagaaaaggggcgtgatcgcctggcggcggagaaagtggcagatccggcatgtgctgaaaaacctgatcctgtttcatgtgcggaacatcgtgtacggcatccaagtgatgctgtgcggcaagggactgacacaccctgtgcctctgaaacggaccctgcagaacaagaggaacaagaacatcaagcgggtcaaccagaagaagggcaacatcaagaggaagtccatcctgctgcacctcattgtgctgaatagccccgagagcaaccccaagttcttcctgacctttagccagctcgagaagaaagctacctggatgagaagaacaggcgccctgagagccacagctcctgctacagcagctcctcaggctcagactcctcattggagagccgccacaacaagcagcatgagcagcagccctagagccgagcctacatcttctagctcttgggccacctgttggcccagatgctgtagctccagctgttactggtccctgagttcttggcctcctgctggcgccgctgaggctacaaacaccagaactagaagcagagagtcccagcggggcagaatgctgacttggagaagtagtctgtggctgcagggcaccagatgttttacaggcgtgcggacaagcagcggaagctgtggcagagcttgtagctgcggaagaggctgtggaacccctagaggcgattggaagagacaccctcctcggaggaatagcgtgatcgtgcacaagatcgtgctggtgtttctgaagtccctgtccagctacaactgcgagagaaggatcagcggcatccagaagagagccatcgagtttgccgtgctgaaactgctgaatatggacctgcactggaactccgcctacctgggcagaactctgctggtcacctgtatcctgtatcaccggtggatcgtgacctccatgtgccagtctcagagatggctgaccagcaccacaagcagatccagcgctctgatgtggacccggcagatcaatcggaggaagctgcagagaaagaagaggcacccaagctggccttggaccagatgccttagaatgaggcctcctagaagcggctacccctacgatgtccctgactatgcgtcc

SEQ ID NO: 1129 - DNA, 4638 bp, Artificial Sequence
  Polynucleotide encoding the hTPA- and HA-extended poly-FSP polypeptide 3B
atggatgcaatgaagagagggctctgctgtgtgctgctgctgtgtggagcagtcttcgtttcgcccagccaggaaatccatgcccgaggagctgctgctgcctcttgtcagtctcctccttctcctcgggaaaccacacctagctccgacgccaccagacggacaagaccaattgccgctcagagcaagaaaaccatgacagccgccggactgacccctaagaacaagaagcggagaaagctgcggcccaagatgatccggaagatccagaagagaaggcggaccgccaaccggcggaatagcagaagggctacccctacaagcaagggcagcctgagaagaaagtacctgagagtgcggggacctcctctgcacacccggaacatcagaaagctgatctggaccaagcagcggagcttcctgtctctgttccccaagctgagagccaccgagcagatgaccaatgtgggctgctctatccctcacgtgcccaaagccacagccgctcactctgtgacagtgaaactgcagctgcccctgaccttcagcaccctgctgtgggatagcagacacaccatgagcctgagcaacatcctgatgaagttccggctgcagtctagcccattcctggccagatcctggaacaccatgcagtggaacaacaagaaaatggccatgaccgtgatcgctggcgcccaccactgtcagtacaagctgacctacaccaaagtgtggaagatgaactggaagaaaatgatgatcggcagccagcatctgctgttcagccctctggatagcagtcccctgcagctcctgctgcaccctcacggcaagagatgcaacccttgctgcagactgacctggatgagccagaacaccagaagcaccaacctggaaaagaaccccagcctgaagaagcagagccagcggagaggaaagctgagcgcctttagcggcagaatcctgcaccagccagaaatggccgccatgagactgatgcccaagttcctgaactccaccaacagctggtggaccctgaccacactgagcttcgtgctgatcgaggaagccagacagcccagcagacctaccggcagaacacctaccaccagactgatggcccctgtgggcagcgtgatgagctgttctctgctgacccagccttctccagccagcgcctgtacaatgcctccactgctgcatccacagtgggcccctcatagtgctggactttctccaggcgcttgcagacctgcctgcacctgtatcagcatgaccaccatcagcagggccacatggggcccagtgtactacgtgtgcaaccggatgaacgtgtccagcgtgctgaagcccttcctgttcaccgtgcctatcgaggacatgagagagtgcaccctgggcagaaacagaatgaatgtgtcctctgtgctgaaaccctgtctgatccctgtgccaatcagcgagaagaagaggaagctgcccaacatcgagatcacccctcagcggtctaaggccatgctgcagaagcagtgctgctacaacctcgtgatcaagcaccctctgatcttcagaatcaacctgcggcggcagggcaagaccaaagatggcgttgtgcagagcctgggcttcctcaaccagcagatcatcctgcagaaagagttcttcatctgcctgctcatgttcatcaagcggtggaagcctgccgccaccaagagcagaaagaagggccacaccaagaacagacggaaggccaagagaaagccccagatctacctgttcttcctgaccgtgtgcggctttcacctgaaaaagaccagcgccaagtggctgaagaagtccaccaagtccagatccaacggcatggaagcttgcggcacacaccccactcctagactgagctgcctgagagttagatgcggcggctggctgtgtggctggacacctagaggtagaaagtccggcgtgatgaagtgctgggatctgtgccccgtgcacaagaagagaggcctgttcagactggattttcaccccagaagcagctccggcaagggaaagaacagcccctgctgccaaaagaaactgcgggtgcagaaccagggccatctgctgatgattctgctgcacaatgaccgggtgttcctcgtgaagatcggcgagaagctgaagcactgtttcaaggcctggggctccagacggaaccggcggtacagaaagatctacggcgagctgaagatgtccctgcaggccttcctgatccacctgagaaaggtggacacccaccacctccaggtggtcaccaaaacagtgaccgccacaacagccgacggccagagaatgcggagactgaagtgcaaggcctgccggctgagatgggccagacctgaacctgctgctcaggcccctcctaagagccactttccacctcatcctagcggccccagcagaacaagtagcctgcagctgagaagcctgttctttagccactgcctgtgcagccagaagaaggaccctgccggcaagctgaaaaagctgctgaagaaaagcagccagctgcggagaagctggcgcaatgtgtccagaatcagcacccctcctccactgatcctgtggcctcaagctgctcctgtgtccgtgatcaccatgaagctgtgggagaagcacttcaagggcctgaattggaacctggtcgtgtggattctgaacctgaagatgatgacctacatggaaatgcactacggccatcaggccccacaggtggcaatgctgcctaagctgctgtgcagacagatgctgcccactctgagcacactgcagcagagacatcctcagggcccttgtcctcctcctgtgacacctctgagagtccagtctgtcctgctgctgggagtgcctcagacagccagaggacctagaagaaaggtcctgatggtgctgtggctgcccgccaatcagtctctgcagaaaagccaggttttccagtgggtgctgcggacagaggtggcccctagatgtcctagatctgccgtggacatcagccccggacctacatctcctagcctggcctcttgtgcctctgtggccattggaaagctggcactgcttggcgcctctgctccttgtggtgctgctggcgctagagaggccggaagatttgctgtgctgggcaccatggtcatgaagctttgtttcttctacctgctgtaccggctgcgcatcccaagcctgaggaagtacagacagcacctgaaccggaagctgcacctgacaagatcctgcctgatcgatctgaccatgatgatgtcccagaagctctggaagaaccagcggaagagaatccctctgccatctccacggcaacatctgctgccacagtaccctctgcacccacctccaccttgtctgctgttgctgcaccatagacaccacctggcctttctcgagatggcctgtagctctcagcacacccacagcatcaagatctggatcagcttcagccatgaagtggaccctccaggcagcgtgtggatactgccttgcgatctgcctcggatgctgccaatctcttcacccctgcacagaccccagatgcctttctggacctgcacctttcctgccacaacctggggcacatgggagacaccttctacatggggctggcggactttcagaggcgctagcagcagcacatcccgggacagcagatccttcttcacctctgctcaccctagcaggccctgcagaatgagactgtaccagtgcaagaagaagctcctcctgaaactgctgaccaccaccacaagcagccccagaagatcccctgctctgagagcaagaggcggcaccacaatcggcgaagtgaccagctgtaccaacctgagcgtgcccatgatgctgaccatcctgatttggaagcgggtgttcatcctcctgctgagcgataagaagggcgccaagaagatcaccttcctgcctattcctccacacctgagacaccctctgctgctgttcgagaagaaacggcctgagtggctgagcatggacctggacggaatgctgacagtgatcggccagggactcgtgggcatgacccctagagatctgggaacagtggcaggcgccaccgctcagattcagcgacctatccaggtgcagactggcggcagactcagaagaaacctgcagagaaacctgaaggtgctccaggtgtccgtgtacagcggcaacctgctgtcctttagcagacggggcatgaagtctagcgtgcggctgaaaaaccgcgagtgggagaaacggaagcagattctcggaggcggcggaaagtacaaagagtacttcctgaagcgcatcctcatccggaaggctatgacagtgctggccggcgacaagaaaggactgggcagattcatgagatgcgtgcagagcgagacaaaggccgtgtctctgcaactgcctctgggaagaaacatggaacaccggttgaccatggacagcgccctgagcctgacaaagagagagggacccgagacactcaaaaagaaatacctggtccagcaccagatgaagtgtctgaccgccgtggattgtctgcaggctttttgggacatgggctacccctacgatgtccctgactatgcgtcc

SEQ ID NO: 1130 - DNA, 4641 bp, Artificial Sequence
  Polynucleotide encoding the hTPA- and HA-extended poly-FSP polypeptide 4B
atggatgcaatgaagagagggctctgctgtgtgctgctgctgtgtggagcagtcttcgtttcgcccagccaggaaatccatgcccgaatccagaagaagaagcagaagtccaacctggacctgcagcaccagcgcagacgcaaaaagaagaaggacaaggtcgagatccggaatcggagccccaaggccaatagcacagagtgtcagggcgagcacagcagagagcagaacctgctgaatctggtgcagctgaaccctcacagccctcaccacagaaaggacgaagaggaccaccagaagcggcaccaccaccacaatcaaaagaaaatgagcgtgatggccaagaagtcccagcagcctctcggacaggcctttggctctctgtgtcagctggtgtccgccgatttcagcgcccctcaagtgaccagactgcggagcctgaaccatctgctgatcaacgagggcaacaaccactggcctagagtggaaatgcctaccggttggctgctcgtgggctacaacaccagaaacacagcccagaatcctcggctgcagcagcacctgaaacactggcagcagtgcaccagagccagatggtgccaagagccttgtcagaccctgaccttcttccatttcttcttctttttcaaaacggtgtccctgtgctgccccggctggtctaaaggacaacctcctccacctggcctgaagccttctagcctggcttctcaggtggccagaaccacaggcgtgtaccagcacgtgtggctgatctgcttcgtgttcttcgtgtgcgtggaaaccggcttctgtcacgtggcccaagtgggactcgagagactggtgtctctgagcggcatcaccgacgtgaaccattgggcccagcctaagccatctcctagcaaaggcaccggcatgaacagacccatcggcctgagagttggcaaaggcgtgtgggccagactgagagcctccgtgtctttctggaccctgctgcctacaacaggcgtgcggacaagaggaagccctctgagactgacactgtggcctccacggaacatcctgaacagcctgcctagcagcatggaaatcgccgtgctgcaagagaaccgcaagaccagaaaggccgccagagagaagcacagaaagaccgacaacctgcacctgtgctactaccacagccagagcaaccggaacaagagccggcagatggaaagcctgggcatgaagctgcagagccctctgtgggattgctccaccacaacaggcacacaccacggctgtctgtgggagatccctagcgttacactgctggcctgcagagtgaacgccgtggaagaactgcacagcaggcggatgtctgtgcggatcgtgaagaactgggtgtcctgctgttacgtgcgcctgtctgctgtgggcctgtctacttggagcgccctggacgtggtcatcaacctgaagcggctgcagaagttcagccagaagtctcagcaccactgcgccctgagaaagatcgagtgggccacaaagctgagcctcggcggaaaagctggaccccaggctcaagagaaggccaacgccaagaagatgcccttccagcggtggatcttcagcaatcagctgaccgtgcagatgctgtgcctgcctattgaagccctgactgccctgttcacctgtcggacagccagcatcagcgtgaacatcagcaccctgatgagcatcctggaagcccctctgttttttcacggcgacctgtgcgaggaaaagaagaacggccggatcagcagccaggctcctctcagactttggtcttggtgcggcacaagccagacctactttggcagcaccgccaagaaaagccccaccagcttttgctgcgagtggggaggacaggctcaccggcagagaaataccggaatggaaatcctgctgtggattctgctcaagatggaaattcagatcttcaagatttgcctgggcgagatgcagctgtgcacctacacaccccacatctgcagacacacctgtagaggcggacctagcgccagcgatagatgctgtagctgtagccctagcggcttcagcgccggaagaggcagatgtccagttcagggatgtctgcggcctcacagagtgcagctgctgagaagatggggccctggatctcctgctggccagagactgtctaagggctttcagctgctccgttggtggggaccaggatctccagctcctgagcctagaaagggcccatttccaccacctgatcctccatggcctgtgaccgctgtgacagtgatggctggctctgtgcctagcgctcagtctgtggatgctctggaaagccctggacctctggcactggaaggacctagcagccccagaaacctgctctggcgggaaatgagcatcttcctgcctggcatcttcacctctcggattctgaacctgcaagtgctgaagaagatcctgcggagctttatgaagctgtaccactctctggtcatgtgcctgcggctgcggaccaagctggaaaaagctctgagcgctctgttcatctggccccagcacagctacaagcagaggcctcctctgcagcctgtgcaggtcgtgctcagactgggaaacctgcctccattcttcagaggcagcgaggtgccctttcctagaccttgccggaccaagatgctgaaccagaagtgtctggcccctttcatcacacacccattcgcctctcagcccctgggacaagagatgcccaacaacacccagatcagactgctgaagcccctgctgacccctgacaccagatggatcttctccaaccagctgcagacagtccagatgctctgtctgccacctctgaagcagggcgagagaatcatttggcccctcggcggctttcagatccccaacttcttttggagcctcggaatcggccacactggcgcctggtggcatactggaaggcggagaagagaatggggcggctccaccgtgtctagaagcccactgtggatcagctccatgatctacctgagaggcatggccttcgccagcgacagctccatcagaaccaccagagtgtcctggtgcagaagatgcggcgccaaatctgccgctgcctccagcctcaagaagaaaccccgggacatctgtcggatcagcgactctaagaagatgacccagaagcgcgagagcaccctgggcaatttctggatgaagctcctccagctgccagacaagaagaagaagtctaccgaaaagaccaagatcatcaagaagatgaagaaacggatcatggtccacatgtgcagctccctggctctgccaacaggcctgacatctctgatcctgccaagcagcgatctggccgtgctgatctctagctccaccagccactttctgatgcggagcccagtgctgcctagctccagactgacttgtgcctctccacagctgcccagaatgtggacctggtccagctggctgaagtggctgaaaaactggaagcggttcaagcttaaaaagaagtacatcctggccatgacgctgaccctgaacgggcatccaagaaccgcctctatcaccctgcctaccaccagcctgaagggctctagaaccagctgttgccccagatctcaccccagactgcctaggacaaagtggcctctgcagtgcctgctgcacagcctgggaacaactggaacactcgtgtgggaaaggggcgtgctgcagatgagaagtctggaagctcactgccctctgcagaccttccacctccaccactgtagaactcagcccagctcttgccctcctgcatggattctgtaccaaggacagtggagcggagccgtcgtgggacttagacctgtggctcaccatctgccaagacctattcagggcctgcactgcccacaggctccacatcaaccagctctgtcttggggcaagtggcccgtgggaatgacaggacctgccagatgttgccggtggcctagacgggaactcaaaaagaatctgctgctcccctgccggtgcagacgcgagtatagagtgacaatgggccaagccttcggcagctttagcgccgactttagcgctccccaggtgttgaagaagaatcggaagcagaacaagattatctgcaagggccaccgcatcacaagcctgatcctgagctttcagcgcgtgaaacttaagaagaaagtcaacgcctgctctcccgcctgcacctctaaagcctggactcccagaaagctcgtggggagagccgtcagaagaaagggcatcatctgtatcaagaatatgttcctgcagcggaagggtttcctgaacctgagccacgtggaaaagttcgtgcctccttctcctcctctggctctcggccctagaatgcagctctgtacccagctggcccggttcttccctatcacacctcctgtgtggcacatcctgggacctcagaggcacaccccttgtcaaaagaaggtgccctccgctagcccatggggccttagaccatctccttgcctgagctggtcctccagaattgtggcccctggacacgccctgagctgtcggactagaagaagatggtccagcaagggctacccctacgatgtccctgactatgcgtcc

SEQ ID NO: 1131 - DNA, 5250 bp, Artificial Sequence
  Polynucleotide encoding the hINV- and HA-extended poly-FSP polypeptide 1A
atgcatcgacggcgctcacggagttgccgggaagaccaaaagcctgtgatggacgatcagcgggaccttatttctaacaatgaacaacttccgatgcttggtaggcggcctggagcaccagagtccaagtgttctaggggcgccctgtacactggtttctccatcctcgtgacactgttgctggcgggacaggcaacaactgcgtatttcttgtatcagcagcaaggaagactggataagcttacagttacatcccagaatctccaacttgaaaacctcagaatgaagcttccgaagcccccaaagcccgtctccaaaatgaggatggcgacaccgctccttatgcaagcccttcccatgggggctctgccccaagggccaatgcagaacgctacaaagtatggaaatatgacagaggatcatgtcatgcatttgcttcaaaacgctgatccccttaaagtttaccctcctctgaaggggagctttccagaaaatcttcgacatctcaagaacacgatggaaacgattgactggaaggtgtttgagagctggatgcaccattggctcctgttcgagatgtcccggcattctctggagcaaaagccgacggacgcacctcccaaggaaagcctggaattggaggacccgagtagtgggctgggcgtcacaaagcaagacctgggacccgtgccgatgaccgagatccagctgaccatgaacgacagcaagcacaagctggaaagccccgctctgaaacaggtgtcaccagcctctccacctactcagcagcctcagacacctcaggattctagacaggtgctggccctggccaagaaaaccctgacaaatgcctccagagccggacagtttcctgtgtggcggagaacaagcagaggcatgagcctgcagtggaagtccggcaatgcctgcacacctctgagatgccctagcagaagccctgccacattcctgacagccctgaatggctggcacagatctggcctgagagcccagatgcctagctcttggtctagcagcggcagaacactgaagctggcccctctgcaagtgaccaccactctgaagctgatcctggtcatgctggaaatcgtgaccgagcgctccctgctgtactccagaatgtgtctggtgcagatccccacacacacctgggagcccgattacttcgtgtccctgcctatgatgttcagctgggccacacagtcttttcccgtgggcgccgtgtttctgaccagacctgccattccttgctgcagctgtaccagccacagcaacccttggagccagagcaatcagcagctgaagtggacccctcacatcctgaagtccgccagcttcgacaagaaaggcttcgtgatcctgagccggcggagcaagattgaggcctctcctatcggctctatcgccagctctcctggacatcctctgggacctacactggccatcagattcatcagcgcccctcagcctagcagctctacagtgacagctgcccctagcggccagtactttatcgccaagaagcggatcaagctgcggcggaacaatatgggcggcaacagatccatctgcctgaccagaaagcgcaagagagagaagcggagccagaagtccaggcagaaccatctgcagctgaaaagctgcagacggaagatcagcaactggtccaagctgagaagcccctggatcttcaccaagtgcgagatctgcgtgaagaacaccgccatcctggctatcaccctgatcacccctcaggaccctcatctggaccctgtgtgtcaccctcatagaaggcctggatggaagggccaccatagagtggtgttctctcaccatcctagcggcagcacaaagagccactggcagcaaagagaacgcggaggcggcagacgcgagaagaagggatgtagagaacagcggaaggtggtcaagaacccctctcagcccgtgcctctgagaaacgatggcatcaccaacggcaacgactccaccagaagctgctccatcagcctgaagaaaagcctggaaaagatgcccctgatgcggagagccagacctaccagctgtagcacctgtagaatgtggtggaagggcaagaaacggcggaaagaaatcgtgcctatgagcctggcctgcagcatcaccgtgtcttttgtgggacagatcagcaccctggtgctggatgtgtctagcatcagccattggcggctgccctgtaaagtgaccgagagcagctccagcttcttctacaccagcgacaggacccctctgagcatcagcagaccaaccagcagagctagacagagctgttgtctgcccggactgacacaccctgctcaccaacctctgggcagcatgagcactagaagagagatgccaagccaggccacaccttctccacctggaccttggagagccgctctgggcaaagaagtgaagagatcccagagcaagctgcgcctgagaaacacaagccctggggagaagaacgatctccagctgttcgtgatgagcgacaccacctacaagatctactggacagtgatcctgctgaacccctgcggcaacctgcacctgaaaacaacatcactgcagcggccacctcggagcatcctgtctctgaatggaatctgggaagtgatgccccggacactggaaggctgcatcagcgtgaaggatcacagaaccagccagaaccacagcaagtgcatcaccgaatgtgtgcggactgccctgaacgtgtccaagaagagactgcctaagctgatgaagaagaaggacagcaccatcttcatcaacaaagtgcgccagaacttcaagcgcaacttcaagaagaagaaacccctcactttcagccccagcagacggatgactcggagaaccatgacaaccaccaaaatgatgatgatgcggcggaccaagcggagaaggcgcaaaaggcggagaatgaccatgatgaccagacggaccctgctgacaaagaaaacctgtctgacccctagaaccagcgccgccacaaaagctctgcctagacagaccatcagccagcggaggcctattcagaccccacctggaacatctctggccatctggggcagaacaagactgaccctgacaggcaccagatccagcggaacaagagcctctccttccgccgtgtgcctgtgttgttggacctgtccaagcagaagcttcccagccgcttctcctagtggactgagagcacctgttggagcccaggctcctcctgaagtgacactgagagcctcttgtgcctctagcgcctctaaagcctgtgctggactttggccttggggagcccaagttcgagttggagctggaacaggcggaggacctgcttgtgttcctgtggctgaagcttctacaggcgcatggacagctgaaggcgccgctggaacaagatgtagagcctctagagccccttgccgccaacttcctgctagctcccctaccaagtgtgaaatttgtgtgaagcgcagacggcggagaaagagaagcagccagtctagaagccccgtgcctaaaaagcgcgagaggatgatgctgcctgtgcgggccagaacagctagatctgcacttcctcagggcagagcacctctggaagggatgctgcttcctagagcactgcctagcctgctgagcagaatgcctgccagaagagagtcccggttttggctggctctgcaggcacttggactcagacctccacatctgcctagctgtcatcctctgcctcaactgttgggccctccacctcctcatcaggccccaatgacactgaaggccctggttaagacctggacacagttccgcaactaccccagagccgacaagaagaatgtccggtctaccgccttcttcctgctggacatcatcctgggcgattgcccaagaacaatggccggaccttctgcctctctgcatcctgcatctggcagagcctccagaaagacctggcagagaaggctgagagcttgtagagcaggcggacctgctggatgggctagacaggcctatcctagactgaaaaccttcggcgtgcccctgggctctattctgtgtctggccggcagcctgtccacaatgatgatcattagcaccaccagacaagagtgcggcaggcgggcttctgtgccttgtagacctatgatcggaagcgccagaccaggaccttggcggacatctgctatgcctagtgccatgggagtcgccctgcctacctcttgtgaaagcggaagatctcctcctgccaccggcggaagaatgccaggatctcagtctatcatgatgagctggatgcctccactggctccatgtgccgcttgtccatgttctcccgctcctacactgtgcccagcacatcctgctagagcaccaacagccgtgcctgcctttacacctctgtctgctcatcctgtgccagtgctgtctggatgtcacctggccgtcagaacctccatgctgacactgctgcccatggaagccaaaaagagcatgaagcggtccaacgctaagaaaatggaagatatgatctgggagagccggctgccactgaggccacaaagaggacctagacctctgcacagatggctgcagcagacaaccggctgtagccagaggcggatcgtgttctttctggccccatacttccctcggcaccctcacagatctccaccaacatcttgcccacctctgctggaagctttcccactgccaagagcttctctgagggccacagtgccaagacatagctctgttctcgccaccggtctgcacctccacagacagatttctctgcccctgagaggattcctcctgcaccaaccactgccaggacagcatctgtggctgtctcacagactgaggctgagactgcccaggacacagccatctttgcctggaccatgtgcaagcctgctgtccacactgtctcagccaccacctcaggctccatctcaagtgtggactgccgctacactgagatgtcctgctgttcctgcagctgcctgtcctcctgctctgagatccatgcctaagagccggaaccaggtgctgttcagacggaatctgaccccaagccagctgagaacactggccccaccttatatgctgctgccccagtctctgtcccagagcctgagtagaaagcagatccctagccagtccatgctcgtgggctacccctacgatgtccctgactatgcgtcc

SEQ ID NO: 1132 - DNA, 5232 bp, Artificial Sequence
  Polynucleotide encoding the hINV- and HA-extended poly-FSP polypeptide 2A
atgcatcgacggcgctcacggagttgccgggaagaccaaaagcctgtgatggacgatcagcgggaccttatttctaacaatgaacaacttccgatgcttggtaggcggcctggagcaccagagtccaagtgttctaggggcgccctgtacactggtttctccatcctcgtgacactgttgctggcgggacaggcaacaactgcgtatttcttgtatcagcagcaaggaagactggataagcttacagttacatcccagaatctccaacttgaaaacctcagaatgaagcttccgaagcccccaaagcccgtctccaaaatgaggatggcgacaccgctccttatgcaagcccttcccatgggggctctgccccaagggccaatgcagaacgctacaaagtatggaaatatgacagaggatcatgtcatgcatttgcttcaaaacgctgatccccttaaagtttaccctcctctgaaggggagctttccagaaaatcttcgacatctcaagaacacgatggaaacgattgactggaaggtgtttgagagctggatgcaccattggctcctgttcgagatgtcccggcattctctggagcaaaagccgacggacgcacctcccaaggaaagcctggaattggaggacccgagtagtgggctgggcgtcacaaagcaagacctgggacccgtgccgatgagaaagatgcagagcctgaatcaccccagcagactgaccaatggctctcctccactgcacctgtgccagcctctgagaatgagcagaacccctcctagaagagtgtgcgccgctcctccacatagactgctgggcccttccagatggaaccctcggagaaagacctggaagatgcggaagaagtacgcccagaagcctagccagaagaaccacctgtacggcggcaagaagcgctctaagttcagcagaagccacctggacttcagcccctactggatgaagaaagtgaaggtgctgttcaaggccgaccagagcgagtctagcctgagcagcggaagatgcagcctgatggaacagatccctcacctgaagtctcggcggaagtggcagatcagacacgtgctgaagaacctgtggctgcccatgagaagcctgggagaaccttggagagccggctttcagtggggagagtctccttggcaagtgatggcctctctgaccggcagagccacatttctgctggccctttgggaatgtagcctgcctcaggcaagactgtgcctgatcgtgtctagaaccctgctgctggtgcagagccggaacaagaaaacaaagctgtggttcagcctgatcaacatccaccaccggaagaacccactgctgcctatgagatggtggtgtaccagaggcggcggaaagcggaaaaagaaaatgtgcaaggtgtccggcggctgcaccgcctgtgttgagagatgtccttggaagggcatctgctggaagtggcctgtgacagtggccgccattagaatgtgtgccctgtctcaccctagcttctacatcagcagcaccgtgtgctttctgagcaagcactgcatgaccgcctgcaccagaaagagaatgaagaccggcgccatccaagagaagggcgctattcaagagaaaggggccatgaccaagcggatctgcgtggtcaatttcgaggcctgcagagagatggaaagcctgagcgcccctgagaagatcaccctgtttgaagcccacatggcccggtgcacctccatcaatgtgctgtgtgtgcgggccagcctgattgagaagctgatgaaagaaaagcgcaagatgaagcggaaccaggtggcctctccacagatcatgcagcggctgttcatcaagggctaccagaacaaccacttcaccttccatctgcaaaacttcgccttcttcagctccttcggcaacaacaagtacatcaatatcctgaccatcctgttccacgtgcggaacatcgtgtacggcatccaagtgatgctgtgcgctagccctcagattatgcagagaaccagcgccgaccggttccggatgaagagaagaatgcagaatctggacaacctgggcgtgccatggcctctgttgcctggaatcccatctctgaacgcccagtggatgttcctgagaatcgcatccccgcaaatcatgcagaggatgagcgccgtgaacttcgagacaatccgggccagaaaccggaacatgaagaaaaccatgagccacctgatcgcccatcaggccctgaagatgagcggcctgagactgtttcaccccagactgctgacacggaagaagcccggaaaactgctgctcgcccatatgtacggcttcagcacctacggcacccagaaaggcgagtgcgtttgtctgcagtgtctgagcggcagcagcctgttcattctgaagcagcccctggacctgaagatcagcaagaccttcatgggccacagagagggcagcgagtctgataatctgggcctgctgtatagcttccctccaccttatcctatcagcgagggcctgaccatgaccaccggcagaaacatcaacagcaactccctgatgaccaactgcctgttcagccccatcttcctgtgccaccacgccatcatgcacagaaagatgacaagccctcacttcaggctgttcagcagcaagatcccacatcctcaggtgccatctgtggtggccctgtgcaagttccgggccttcatccacacacctagaagccctggctgcagcgtgtacgccaatatgtgctggcccaagttcttcctgaccttcagccagcagtggtccagcgtgacatctctggaatggacagcccaagagagaggctgcagcagctggctgatgaagcagacatggatgaagtcttggagcctgcgggaccccagctacagatccatcctggaatacgtgtccaccagagtgctgtggatgcctacctctaccgtgctgcaggctcatccacaagttccagctctggctcctcaagcctggtggcctgctagaagaggacctctgacatctgccccatccgctcagcagtccctgaccagagagaagattatcaaccccaccatcagctgcccctttcagagccccaccaagagactgatctaccctcctagcacctgttctctgccctgcagaggcttcctgcctagcagatttccttggggcccacctcctctgaacagcgtgatcgtgcacaagatcgtgctggtgttcctgaagtccctgtccagctacaactgcgagcggagaatcagcggcatccagaagagagccatcgagttcgccgtgctgaaactgctgaatatggacctgcctctcgagaacacacagatccccagaacaagcccactgtggaagatcacaatggtgctgacataccccaactgcgtggtgcatgtgctgatgtttggcgccctgagagccacagctcctgctacagctgcacctcaggctcagacccctcattggagagctgccacaacaagcagcatgagcagcagccctagagccgagcctacatcttctagctcttgggccacctgttggcccagatgctgctccagctcttgttactggtcactgtctagctggcctccagctggcgccgctgaagctacaaataccagaaccagaagccgcgagagccagaggggtagaatgctgacttggagaagctccctgtggttgcagggcaccagatgttttacaggcgtgcggaccagctccagatacaagaaaagaggcgtgatcgcctggcggagacagatcaatagacggaagctgcagagaaagaagcactggaacagcgcctacctgggcagaacactgctggtcacctgtatcctgtatcaccggtggatcgtgacctccatgtgtcagtcccagagatggctgaccagcaccacaagtagatctagcgccctgatgtggaccgagctgagcctggaaccatggattccctacctgcatcagcagaaaacccagcggacactggaatccgccggactgtttccttggctgcacacccagtgccaagagaagaaaagcagaaagctgatgtccagctgcacacacccctgcacaatgctgctgccacagggatgtcatcctgcctggctgagccctatctctgcctgtccaagactgctgccatatccttttcacgtgctggctctggaagtgacctttcctcctggaaccgccatgcctcagatgcagttgcaggctctggctatgtgggagaaaggctgggataagcctggcaccagcctgcagtgctacctgaacagaagaagaaacagccggaagcagagccaggtgcaactggccattcaggtgctgctcgtggacaagcacaagtactttctgttcggccaaaagaaaggccacatgatctttagcctggccaacggcctgtggtttaacctgattttcaactcccggaagaaactgctcgaggacatgaagcaaaatggcttcaccggcaaaggcctgacacaccccgtgcctctgaagcggactctgcagaacaaaagaaacaagaatatcaaacgcgtcaaccagaagaagggcaacatcaagcggaagtccatcctgctgcacctgattgtgctgaatagccccgagagcaacctgatcctgatccagcatggcggcatcttcacctttcggttctgggtcgagaagctgtcctggaacatctgcaagaacctgagcctgtacctggacaagttcgtgcagagactgctgtacgtgtacatcatcgagacaaacgtgttcgtgctgaacctgtttcatgtgcccgtgaaccagatcttcatgatggccttctacctgaagtacaccgagaaggcctgggtcatggaactggaatggctgatccaacagcagtgctatcagggcagctgcggcagagcttgttcttgtggaagaggctgtggcacccctagaggcgattggaagagacatcctcctcggagagccttctggaagcctcctagccagggcatctctagctgtctgatgaccggctgttggctcgagaagaaagctacctggatgcggcggacccgccggaagaagagggaagatcattgcggactgagacaccccagctggccttggacaagatgtctgaggatgaggcctccaagaagcggctacccctacgatgtccctgactatgcgtcc

SEQ ID NO: 1133 - DNA, 5247 bp, Artificial Sequence
  Polynucleotide encoding the hINV- and HA-extended poly-FSP polypeptide 3A
atgcatcgacggcgctcacggagttgccgggaagaccaaaagcctgtgatggacgatcagcgggaccttatttctaacaatgaacaacttccgatgcttggtaggcggcctggagcaccagagtccaagtgttctaggggcgccctgtacactggtttctccatcctcgtgacactgttgctggcgggacaggcaacaactgcgtatttcttgtatcagcagcaaggaagactggataagcttacagttacatcccagaatctccaacttgaaaacctcagaatgaagcttccgaagcccccaaagcccgtctccaaaatgaggatggcgacaccgctccttatgcaagcccttcccatgggggctctgccccaagggccaatgcagaacgctacaaagtatggaaatatgacagaggatcatgtcatgcatttgcttcaaaacgctgatccccttaaagtttaccctcctctgaaggggagctttccagaaaatcttcgacatctcaagaacacgatggaaacgattgactggaaggtgtttgagagctggatgcaccattggctcctgttcgagatgtcccggcattctctggagcaaaagccgacggacgcacctcccaaggaaagcctggaattggaggacccgagtagtgggctgggcgtcacaaagcaagacctgggacccgtgccgatgggagctgctgctgcctcttgtcagtctcctccttctcctcgggaaaccacacctagctccgacgccaccagacggacaagacctattgccgctcagagcaagaaaaccatgacagccgccggactgacccctatgatccggaagatccagaagcggcggagaaccgccaaccggtgtctgagagttagatgtggcggctggctgtgtggctggacacctagaggacagaacaccagaagcaccaacctggaaaagaaccccagcctgaagaagcagagccagcggagaggaaagctgagcagcctgttcttcagccactgcctgtgccggaacagcagaagggccacacctacatctaagggcagcctgcggcggaagtacctgagagtgcctattcctccacacctgagacaccctctgctgctgatggacctggacggaatgctgaccgtgatcggacagggactcgtgggcatgacccctagagatctgggaacagtggctggcgccaccgctcagattcagaggcctattcaggtgcagaccggcggcagacttacacctcctcctctgattctgtggcctcaggccgctcctgttgatcctcctggctctgtgtggattctgccctgcaagaacaagaagcggagaaagctgcggcccaagcggctggactttcaccctagatcttctagcggcgtgtccgtgatcaccatgaagctgtgggagaagcacttcaagggcctgaactggaacctggtcgtctggattctgaacctgaagatgatgaacatcgagatcacccctcagcggagcaaggccagaaagtccggcgtgatgaagtgctgggatctgtgccccagcgagaagaagaggaagctgcctctgcctctgaccttcagcaccctgctgtgggactctagacatagaggcgccagctccagcaccagcagagactccagaagctttttcaccagcgctcaccccagcagaccctgcagaatgagactgtaccagttcctgatccacctgagaaaggtggacacccaccatctgcaggtcgtgaccaagaccgtgacagccacaacagctgacggccagagaatgcggagactgaagtgcaaggcctgccggctgagatgggctagacctgaacctgctgctcaggcccctccaaagagccactttccacctcatcctagcggccctagcagaaccagttctctgcagctgcggagcatccctcacgtgccaaaagccacagccgctcacagcgtgacagtgaagctgcagaagggaaagaacagcccctgctgccaaaagaaactgcgggtgcagaatcagggccatctgctgatgatcctgctgcacaatacctacatggaaatgcactacggccatcaggccccacaggtggccatgctgcctaagctgctgtgcagacagatgctgcccactctgagcacactgcagcaaagacacccacagggcccttgtcctccacctgtgacaccactgagagtccagtctgtcctgctgctgggagtgcctcagacagctgctagacagcctagcagacccaccggcagaacccctaccacaagactgatggcccctgtcggcagcgtgatgagctgttctctgctgacccagccttctccagccagcgcctgtacaatgcctccactgctgcatcctcagtgggccccacattctgctggattgtctcccggcgcttgcagacctgcctgtacctgtatcagcatgaccaccatctccagagccacctggcaggtttccgtgtacagcggcaatctgctgagcttctccagacggggcatgaagagtagcgtgcggctgaaaaacagccggcggaacagacggtacagaaagatctacggcgagctgaagatgtccctgcaggccgtggctcctagatgtcctagatctgccgtggacatcagccccggacctacctctcctagcctggcctcttgtgcctctgtggccattggaaaactggccctgcttggcgcttctgccccttgtggtgctgctggcgctagagaggctggaagatttgccgtgctgggcaccatggtcatgaagcacctgaaccgcaagctgcatctgacccggtcctgcctgatcgatctgaccatgatgatgagccagaagctctggaagaaccagcggaagagaatccctctgccatctcctagacagcatctgctccctcagtaccctctgcaccctcctccaccttgtctgctgctgctccaccacagacaccacctggcctttctggaaatggcctgcagcagccagcacacccactccatcaagatctggatcagctttagccacgagcagagcagcccattcctggccagatcctggaacaccatgcagtggaacaacaagaaaatggccatgacagtgatcgctggcgcccaccactgtcagtacaagctgacctacaccaaagtgtggaagatgaattggaagaaaatgatgatcggctcccagcacctcctgttcagccctctggatagctctccactgcaactgctgcttcaccctcacggcaagagatgcaacccttgctgcagactgacatggatgtccatgctgcagaaacagtgctgctacaacctcgtgatcaagcacccactgatcttcagaatcaacctgcggagacagggcaagaccaaggatggcgttgtgcagagcctgggcttcctgaaccagcagatcatcctgcagaaagagttcttcatctgcctgctcatgtttatcaagcggtggaagcctgccgccaccaagagagagtgggagaaacgcaagcagatcctcggcggaggcggcaagtacaaagagtacttcctgaagcgcatcctgattcggaaggccatgactgtgctggccggcgacaagaaaggcctgggcagattcatgagatgcgtgcagagcgagacaaaggccgttagcctgcagctcccactcggaagaggccctgtgtactacgtgtgcaaccggatgaacgtgtccagcgtgctgaagcccttcctgttcaccgtgcctatcgaggacatgagagagtgcacactgggccgcaacagaatgaatgtgtcctctgtgctgaaaccctgtctgatccctgtgccaatcgacctgcctcggatgctgccaatcagcagcccactgcacagaccccagatgccattctggacctgcacctttcctgccacaacatggggcacctgggagacaccttctacatggggctggcggacctttcggggccctagaagaaaagtgctgatggtgctgtggctgcccgccaaccagagtctgcagaaaagccaagtgttccagtgggtcctgcggaccgagaacatccggaagctgatctggaccaagcagcggagcttcctgtctctgttccccaagctgagagccaccgaacagatgaccaatgtgggctgcgccttcagcggccggattctgcatcaacctgaaatggccgccatgcggctgatgcccaagttcctgaatagcaccaacagctggtggacctgtaccaacctgagcgtgcccatgatgctgaccattctgatttggaagcgggtgttcattctcctgctgtccgacaagaagctgctgaagaagtctagccagctgaggcggtcttggagaaacgtgtcccggatcagccaccagatgaagtgtctgaccgccgtggactgtctgcaggccttctgggacatgaacatggaacaccggctgaccatggacagcgccctgagcctgacaaagagagagggacccgagacttgcaagaagaagctcctgctgaaactgctgacaatgagcctgagcaacatcctgatgaagttccggctgcggctgagaatcccaagcctgaggaagtatcgccagcatctgaaaaagaccagcgccaagggcgagaagctgaagcactgctttaaggcttggggcagaggcccacctctgcacacaagaagccagaagaaagaccctgccggcaagctgaaaaaactgaccacactgagcttcgtgctgatcgaggaacggcggaacctgcagcggaatctgaaagtcctgtggctcaagaaaagcaccaagagccggtatctgttcttcctgaccgtgtgcggcttcttcgagaagaaacggcctgagtggctgtcctccagaaagaagggacacacaaagaatcggaggaaggccaagcggaagccccagatcgtgcacaagaagagaggcctgttcctcaaaaagaaatacctggtgcagggcgccaagaagatcaccttcctgtccaacggcatggaagcttgcggcacacaccccacaccaagactgagcgacagagtgttcctggtcaagatcaccaccaccacaagcagccccagaagaagcccagcactgagagctagaggcggcaccacaattggcgaagtgaccagcctgtgcttcttctacctgctgtacggctacccctacgatgtccctgactatgcgtcc

SEQ ID NO: 1134 - DNA, 5250 bp, Artificial Sequence
  Polynucleotide encoding the hINV- and HA-extended poly-FSP polypeptide 4A
atgcatcgacggcgctcacggagttgccgggaagaccaaaagcctgtgatggacgatcagcgggaccttatttctaacaatgaacaacttccgatgcttggtaggcggcctggagcaccagagtccaagtgttctaggggcgccctgtacactggtttctccatcctcgtgacactgttgctggcgggacaggcaacaactgcgtatttcttgtatcagcagcaaggaagactggataagcttacagttacatcccagaatctccaacttgaaaacctcagaatgaagcttccgaagcccccaaagcccgtctccaaaatgaggatggcgacaccgctccttatgcaagcccttcccatgggggctctgccccaagggccaatgcagaacgctacaaagtatggaaatatgacagaggatcatgtcatgcatttgcttcaaaacgctgatccccttaaagtttaccctcctctgaaggggagctttccagaaaatcttcgacatctcaagaacacgatggaaacgattgactggaaggtgtttgagagctggatgcaccattggctcctgttcgagatgtcccggcattctctggagcaaaagccgacggacgcacctcccaaggaaagcctggaattggaggacccgagtagtgggctgggcgtcacaaagcaagacctgggacccgtgccgatgatccagaagaagaaacagaaatccatggccaagaagtcccagcagcctctggtgctgaagaagaaccggaagcaagagtggggaggacaggcccacagacagagaaacaacgccaagaagatgcccttccaagaggaaaagaagaacggccggatcagcagcagcctgatcctgagcttccagagagtgaaggacagcaagaaaatgacccagaagatgtgcagctctctggccctgcctacaggcctgacatctctgatcctgcctagcagcgatctggccgtgctgatctctagcagcaccagccactttctgatgcggagccctgtgctgccaagctccagactgacatgtgcctctccacagctgccccggatgtggacatggtctagctggctgaagcaccccagaaccgctagcatcacactgcctaccacaagcctgaagggcagcagaaccagctgctgcccaagatctcaccccagactgcctaggaccaagtggcctctgcagtgtctgctgcacagcctgggaacaacaggcacactcgtttgggaaaggggcgtgctgcagatgagaagcctcgaagcccattgtcctctgcagaccttccatctgcaccactgcagaacccagccaagctcttgtcctcctgcctggattctgtaccaaggccagtggagcggagccgtcgttggacttagacccgtggctcaccatctgcctagacctatccagggcctgcactgtcctcaggctcctcatcaacctgctctgagctggggaaagtggcccgtgggaatgacaggacctgccagatgctgtcggtggccccgcagatctcagaagtctcagcatcactgcgccctgcggaagatcgagtgggccacaaaactgtctctcggcggaaaagccggaccacaggctcaagagaaggccagaccttctccttgcctgtcctggtccagcagaattgtggcccctggacacgccctgagctgtcggactcgtagaagatggtcctccaagtgcagaggcggccctagcgccagcgatagatgttgtagctgtagccccagcggcttcagcgccggaagaggcagatgtcctgtgcagggatgtctgaggccacacagagttcagctgctgagaagatggggcccaggatctcctgctggccagagactgtctaagggcttccaactgctgcgttggtggggacctggatctccagctcctgagcctagaaagggcccatttcctccacctgatcctccatggcctgtgaccgctgtgacagtgatggctggctctgtgcctagcgcacagtctgtggatgccctggaatctcctggacctctggctctggaaggccctagcagccctagaaacctgctgtggcgggaaatgagcatctttctgcccggcatcttctgccaaaagaaggtgccatctgccagcccctggggacttgttcctccttctccaccactcgctctgggccctagaatgcagctgtgtacccagctcgccagattcttccccatcacacctccagtgtggcacatcctgggacctcagagacacacacctcaggtggtcctgagactgggcaacctgcctccattcttcagaggcagcgaggtgccctttcctagaccttgccggaccaagaacgagggcaacaatcactggcccagagtggaaatgcctaccggctggctgctcgtgggctacaacaccagaaacacagcccagaatcctcggctgcagcagcatctgaaacactggcagcagtgcacacgggccagatggtgtcaagagccttgtcagaccctgaccttcttccacttcttcttctttttcaaaacggtgtccctgtgttgtcccggctggtccaaaggacaacctccacctcctggcctgaagccttctagcctggcttctcaggtggccagaaccacaggcgtgtaccagcacgtgtggctgatctgcttcgtgttcttcgtgtgcgtggaaaccggcttctgtcacgtggcacaagtgggcctcgagagactggtttctctgagcggcatcaccgacgtgaaccattgggcccagcctaagccatctcctagcaaaggcaccggcatgaacagacccatcggcctgagagttggcaaaggcgtgtgggccagactgctcaagaagaagcctagagacatctgtcggatctccaacagaaagacccggaaggccgccagagagaagcaccgcaaaacagatagagccagcgtgtccttctggactctgctgcctacaacaggcgtgcggacaagaggaagccctctgagactgactctgtggcctcctagatgcagatgcagacgcgagtacagagtgaccatgaacatcctgaacagcctgccaagcagcatggaaatcgccgtgctgcaagaaaccgccaagaaaagccctaccagcttctgctgcaacctggacctgcagcatcagcgcagacgcaaaaagaagaaagacaaggtcgagatccggaatcggagccccaaggccaatagcacagagtgtcagggcgagcacagcagagagcagaatctgctgaatctggtgcagctgaatcctcacagccctcaccaccggaaggacgaagaggaccaccagaagagacaccaccaccacaatcaaaagaagatgagcgtcccactgttcttccacggcgacctgtgtagagagagcaccctgggcaatttctggatgaagctgctccagctgcctcagaggcctccactgcaaccagtgaccggaatggaaatcctgctttggattctgctgaagatggaaattcagatcttcaagatttgcctgggcgagatgcagctctgcacctctcggattctgaacctgcaagtgctgaaaaagatcctgcggagctttatgaagctgtaccacagcctcgtgatgtgcctgcggctgaggaccaagctggaaaaggctctgagcgccctgttcatctggcctcagcactcctacaagatcacacacccattcgccagccagccactgggacaagagatgcccaacaacacccagatccggctgctgaagcccgacaagaagaagaaaagcaccgaaaagaccaaaggccaggctttcggcagcttctccgccgatttttcagcccctcaaggacaggcttttggctccctgtgtcagctggtgtccgccgactttagcgccccacaagtgaccagactgcggagcctgaaccatctgctgatttggctgaagaattggaagcggttcaagctcaaaaagaaatatcaggcccctctgcggctgtggtcttggtgcggaacaagccagacctacttcggcagcatcatctgtatcaagaatatgttcctgcagcggaagggtttcctgaacctgagccacgtggaaaagttcgagcttaagaagaatcttctgctccccgtcgtgatcaacctgaagagactgcagaaattcatgctgaaccagaagtgcctggctccatttcctgcctgcaccagcaaagcctggacacccagaaaactcgtgggcagagccgtgcggagaaagggcattctggccatgacactgaccctgaacggaatcgaggccctgacagccctgtttacctgtagaaccgcctccatcagcgtgaacatcagcaccctgatgagcatcctggaagccatcatcaagaagatgaagaaacggatcatggtgcaccggtggatcttctccaatcagctgaccgtgcagatgctctgcctgcctctgctgacccctgacaccagatggatctttagtaatcagctgcagacagtgcaaatgctgtgtctgccacctctgaagcagggcgagagaatcatttggccactcggcggctttcagatccccaatttcttctggtccctcggcatcggacacactggcgcatggtggcatactggtagaaggcggagagagtggggcggctctaccgtgtctagaagcccactgtggatcagctccatgatctacctgagaggcatggccttcgccagcgacagctccatcagaaccaccagagtgtcctggtgtcggagatgtggcgccaagtctgccgcagcctcttcttctccactgtgggattgcagcaccacaaccggcacacaccacggatgcctgtgggagatccctagcgttaccctgctggctaacctgcacctgtgctactaccactctcagagcaacagaaacaagagccgccagatggaatccctgggcatgaagctccaacttaaaaagaaagtgaacgcctgcagcacctacacaccccacatctgcagacacacctgtcgcgtgaacgccgtcgaggaactgcactctagaaggatgtccgtgcggatcgtgaaaaattgggtgtcctgctgctacgtgcggctgtcagctgtgggactgtctacttggagcgctctggacaacaagatcatctgcaagggccacagaatcaccggctacccctacgatgtccctgactatgcgtcc

SEQ ID NO: 1135 - DNA, 5250 bp, Artificial Sequence
  Polynucleotide encoding the hINV- and HA-extended poly-FSP polypeptide 1B
atgcatcgacggcgctcacggagttgccgggaagaccaaaagcctgtgatggacgatcagcgggaccttatttctaacaatgaacaacttccgatgcttggtaggcggcctggagcaccagagtccaagtgttctaggggcgccctgtacactggtttctccatcctcgtgacactgttgctggcgggacaggcaacaactgcgtatttcttgtatcagcagcaaggaagactggataagcttacagttacatcccagaatctccaacttgaaaacctcagaatgaagcttccgaagcccccaaagcccgtctccaaaatgaggatggcgacaccgctccttatgcaagcccttcccatgggggctctgccccaagggccaatgcagaacgctacaaagtatggaaatatgacagaggatcatgtcatgcatttgcttcaaaacgctgatccccttaaagtttaccctcctctgaaggggagctttccagaaaatcttcgacatctcaagaacacgatggaaacgattgactggaaggtgtttgagagctggatgcaccattggctcctgttcgagatgtcccggcattctctggagcaaaagccgacggacgcacctcccaaggaaagcctggaattggaggacccgagtagtgggctgggcgtcacaaagcaagacctgggacccgtgccgatgaccgagatccaattgaccatgaacgacagcaagcacaagctggaaagccccgctctgaaacaggtgtcaccagcctctccacctactcagcagcctcagacacctcaggatagcagacaggtgctggccatgcctagcagctggtctagctctggcagaacccagcggaaggtggtcaagaatcctagccagcctgtgcctctgagaaacgacggcatcaccaacggcaacgactccaccagaagctgcagcatcagcctgaagaaaagcctggaaaagatgcccctcatgatgaagaagaaggacagcaccatcttcatcgtgcccatgagcctggcctgtagcatcaccgtgtctttcgtgggccagatcagcacactggtgctggatgtgtccagcatctcccactggaacaaagtgcggcagaacttcaagcggaacgccgacaagaagaacgttcggagcggcgagaagaacgacctgcagctgtttgtgatgagcgacaccacctacaagatctactggaccgtgatcctgctgaacccctgcggcaatctgcacctgaaaaccaccagcctgggcgactgtcctagaacaatggccggaccttctgcctctctgcaccctgcatctggcagagcctctagaaagacctggcagagaaggctgagagcctgtagagctggtggacctgctggatgggccagacaggccttcgataagaaaggctttgtgatcctgagcgtcggagccggaacaggcggaggacctgcttgtgttcctgtggctgaagcttctacaggcgcttggacagctgaaggcgccgctggaacaagatgtagagcttctagagccccttgcagacagctgcctgccagctctcctaccaagtgcgagatctgcgtgaagcgcagacggcggagaaagagaagcagccagtctagaagccccgtgcctaagaaacgcgagagaatgatgctgcccgtgcgggccagaacagctagatctgcacttcctcaggggagagcccctcttgagggaatgctgcttcctagagcactgcccagcctgctgtctagaatgccagccagaagagagagccggttttggctggctctgcaggcacttggactcagacctccacatctgcctagctgtcatcctctgcctcaactgcttggccctccacctcctcatcaggcccctacagctttcttcctgctggacatcattctgcggctgccctgcaaagtgaccgagtctagcaatatgggcggcaacagatccatctgcctgaccaacgccaagaaaatggaagatatgatctgggagagcacgcccctgagcatcagcagacctacatctagagccaggcagagctgttgtctgcccggactgacacatcctgctcaccagccactgggatctatgaccctggccatcagattcatcagcgctcctcagcctagctccagcacagtgacagctgctcctagcggccagtacttcaagggcaagaagcggcggaaagagatcttcaagaagaagaaacccctgacattcagccccagcctggccaaaaagaccctgaccaatagcagcttcttctacaccagcgaccgcgaggccaagaaatctatgaagcggagcatgaccctgaaggccctggtcaagacctggacacagttcagaaactaccccagagcctcctctcctggacaccctctgggacctaatggcatctgggaagtgatgcccagaacactggaaggctgcatctccgtgaaggaccacagaacaagccagaaccacagcaagtgcatcaccgagtgtgtgcggacagccctgaacagaagaagcaagatcgaggcctctcctatcggctctatcgccctgagatccatgcctaagagcagaaaccaggtgctgttcagacggaatctgaccccaagccagctgagaactctggcccctccttatatgctgctgccccagtctctgagccagagcctgagcagaaagcagatccctagccagtccatgctggtggcctctagagcaggacagtttcctgtgtggcggagaaccagcagaggaatgagcctgcagtggaagtccggcaatgcctgcacacctctgagatgccctagcagaagccctgccacattcctgacagctctgaacggctggcacagatctggactgagagcccagagaaagcgcaagcgcgagaagagaagccagaagtccaggcagaaccatctgcagctgaagtcctgccggcgcaagatctccaactggtccaagctgagaagcccctggatcttcgtgtccaagaagagactgcccaagctgaccaagtgtgaaatctgtgtcaagaacaccgccatcctggctatcaccctgatcacccctcaggaccctcatctggaccctgtgtgtcaccctcatagaaggcctggatggaagggccaccacagagtggtgttttctcatcaccctagcggcagcaccaagagccactggcagcaaagagaacgcggaggcggcagacgggaaaagaagggctgtagagagagatccctgctgtactccagaatgtgcctggtgcagatccccacacacacctgggagcccgattacttcgtgtctctgcccatgatgttcagctgggccacacagtcattccccgtgggagccgtgtttctgaccagacctgccattccttgctgtagctgcacaagccacagcaacccttggagtcagagcagacacccacacagaagcccacctacctcttgtcctccgctgctggaagcctttccactgcctagagcatccctgagagccaccgtgccaagacatagctctgtgctggcaaccggactgcatctgcacagacagatttctctgcccctgagaggattcctgctgcatcaaccactgccaggccagcatctgtggctgtctcatagactgcggctgagactgccaagaactcagcggcctcctagatccatcctgagccttagactgccactgaggccacagagaggacccagacctctgcatagatggctgcagcagaccacaggctgtagccagagaagataccccagactgaaaaccttcggcgtgccactgggctccattctgtgtctggctggatctctgagcaccatgatgatcattagcaccaccagacaagagtgtggcaggcgggcatctgtgccctgtagacctatgatcggaagcgccagaccaggaccttggagaacatctgctatgcctagcgccatgggcgtcgcactgcctacaagctgtgaatccggaagatctcctcctgccaccggcggaagaatgcctggaagccagagcattatgatgagctggatgcctcctctggctccttgtgccgcttgtccttgttctcccgctcctacactgtgtcccgctcatcctgctagagcacctacagccgtgcctgcctttacacctctgtctgcacatcctgtgcctgtgctgtctggatgtcacctggccgtcagaacctccatgctgacactgctgcctatgctgaagctggccccactgcaagtgaccaccacactgaagctgatcctggtcatgctggaaatcgtgaccgagagcactcggagagagatgccttctcaggccacaccttctccacctggaccttggcgagccgctctgggcaaagaagtgaagagatcccagagcaagctgcgcctgagaaacacaagccccatcgtgttctttctggccccatacttccccagacggatgaccagacggaccatgacaaccaccaaaatgatgatgatgcggcggaccaagcggagaaggcgcaaaaggcggagaatgacaatgatgacaaggcggaccctgctgacaaagaaaacctgtctgacccctagaaccagcgccgctaccaaagctctgccaaggcagacaatctcccagcggaggcctattcagacccctcctggaacatctctggccatctggggcaaccagcagctgaaatggacccctcacatcctgaagtccgccagcagaagggccagacctaccagctgtagcacctgtagaatgtggtggatcgccaaaaagcggatcaagctgcggcggaacagaaccagactgacactgacaggcacaagaagcagcggcaccagagcttctccatccgccgtttgcctgtgttgctggacctgtccttccagaagcttcccagccgcttctccaagcggattgagagcacctgttggagcacaggcccctccagaagttacactgagagctagctgtgcctccagcgcctctaaggcttgtgctggactttggccttggggagcacaagttcggcaaccatctttgcctggaccatgcgcttctctgctgagcacactgtctcagccacctccacaggctccatctcaagtgtggacagccgcaacactgagatgtcctgctgttccagctgctgcctgtcctcctggctacccctacgatgtccctgactatgcgtcc

SEQ ID NO: 1136 - DNA, 5232 bp, Artificial Sequence
  polynucleotide encoding the hinv- and ha-extended poly-fsp polypeptide 2b
atgcatcgacggcgctcacggagttgccgggaagaccaaaagcctgtgatggacgatcagcgggaccttatttctaacaatgaacaacttccgatgcttggtaggcggcctggagcaccagagtccaagtgttctaggggcgccctgtacactggtttctccatcctcgtgacactgttgctggcgggacaggcaacaactgcgtatttcttgtatcagcagcaaggaagactggataagcttacagttacatcccagaatctccaacttgaaaacctcagaatgaagcttccgaagcccccaaagcccgtctccaaaatgaggatggcgacaccgctccttatgcaagcccttcccatgggggctctgccccaagggccaatgcagaacgctacaaagtatggaaatatgacagaggatcatgtcatgcatttgcttcaaaacgctgatccccttaaagtttaccctcctctgaaggggagctttccagaaaatcttcgacatctcaagaacacgatggaaacgattgactggaaggtgtttgagagctggatgcaccattggctcctgttcgagatgtcccggcattctctggagcaaaagccgacggacgcacctcccaaggaaagcctggaattggaggacccgagtagtgggctgggcgtcacaaagcaagacctgggacccgtgccgatgagaaagatgcagagcctgaatcaccccagcagactgaccaacatgagcagaacacctccaagacgcgtgtgcaaccctcggagaaagacctggaagatgcggaagaagtacgcccagaagcctagccagaagaaccacctgtacaacagccggaagaaactgctcgaggacatgaagcagaatggcttcacaggccacagagagggcagcgagtctgataatctgggcctgctgtactcctttcctcctatccggatgtgcgccctgtctcaccctagcttctacatcagcagcaccgtgtgctttctgagcaagcactgcatgaccgcctgcacacaaaagaaaggccacatgatcttcagccgcgagaagatcatcaaccccaccatcagctgcccctttcagagccccacaaagcggctggaactgagcctggaaccttggattccctacctgcaccagcagaaaacccaaggcggcaagaagagaagcaagttccctggcaccagcctgcagtgctacctgaacagatgcagcctgatggaacagatccctcacctgaagtccgcctctccacagatcatgcagagaaccagcgccgaccggttccggatgaagcggagaatgcagaacctggacaatctgggcgttccatggccactgctgcctggacctctggaaaacacacagatccccagaacaagccctctgtggaagatcacaatggtgctgacataccccaactgcgtggtgcacgtgctgatgttctggctgcctatgagatctctgggcgagccttggagagctggctttcagtggggagagtccccttggcaagtgatggctagcctgacaggcccctatcctatcagcgagggcctgaccatgaccaccggcagaaacatcaacagcaactccctgatgaccaactgcctgttcagccccatcttcctgtgccaccacgccatcatgcaccggaagatgacaagcccacacttcagactgttcagcagcaagatcccacatcctcaggtgccatctgtggtggccctgtgcaagttcagagccacatttctgctcgccctgtgggagtgtagtctgcctcaagccagactgtgcctgatcgtgtctagaaccctgctgctggttcagtctgccgctcctccacatagactgctgggcccttctagatggtccagaagccacctggacttcagcccctactggatgaagaaagtgaagctggccaacggcctgtggttcaacctgatcttcgtgctgttcaaggccgaccagagcgagtctagcctgtctagcggccggaacaagaaaacaaagctgtggttctccctcatcaacatccaccaccgcaagaatcctctgctgcccatgagaatccccagcctgaatgcccagtggatgttcctgagaatcctgcttctggcccatatgtacggcttcagcacctacggcacccagaaaggcgagtgcgtttgtctgcagtgtctgagcggcagcagcctgttcattctgaagcagcccctggacctgaagatctccaagaccttcatgctgcaagctcacccacaggtgccagctcttgctcctcaagcttggtggcctgctagaagaggccctctgacatctgctccatccgctcagcagtctctgacagctagccctcagattatgcagcggatgagcgccgtgaacttcgagacaatcatctaccctccaagcacctgtagcctgccttgtagaggcagaacactggaaagcgccggactgtttccttggctgcacacccagtgtacacacccctgtaccatgctgctgccacaaggctggtggtgtacaagaggcggcggaaagcggaaaaagaaaatgtgcaaggtgtccggcggctgcaccgcctgtgttgagagatgtccttggaagggcatctgctggaagtggccagtgacagtggctgctcagtggtctagcgtgacctctctggaatggacagcccaagagagaggctgcagcagctggctgatgaagcaaacatggatgaagtcttggtccctgcgggaccccagctacagatccatcctggaatacgtgtccaccagagtgctgtggatgcccacaagcaccgtgcggagaagaaacagcagaaagcagtctcaggtgcagctggccattcaggtgctgctcgtggacaagcacaagtactttctgttcggcagagcccgcaaccggaacatgaagaaaaccatgagccacctgatcgcccatcaggccctgaagatgagcggcctgaggctgtttcatcctcggctgctgacaagaaagaagcccggcaagttcctgcctagcagatttccttggggccctcctcctctgtgtcatcctgcttggctgagccctatctccgcctgtccaagactgctgccatatccttttcacgtgctggccctggaagtgacctttccacctggaacagccatgcctcagatgcaactgcaggccctggccatgtgggagaaaggctgggataagcggaagagaatgaagaccggcgccatccaagagaagggcgctattcaagagaaaggggccatgaccaagcggatctgcgtggtcaatttcgaggcctgcagagagatggaaagcctgagcgcccctgagaagattaccctgtttgaagcccatatggcccggtgcacctccatcaatgtgctgtgtgtcagagcctctctgatcgagaagctgatgaaagaaaagcgcaagatgaagcgcaaccaggtggcatccccacaaattatgcagaggctgttcattaagggctaccagaacaaccacttcaccttccatctgcaaaacttcgccttcttcagcagcttcggcaacaacaagtacatcaatatcctgacgcggcgcaagaaaagagaggaccactgcggactgctgatcctgatccagcacggcggcatcttcacctttcggttctgggtcgaaaagctgagctggaacatctgcaagaacctgagcctgtacctggataagttcgtgcagcggctgctgtacgtgtacatcatcgagacaaacgtgttcgtgctgaacctgttccacgtgccagtgaaccagatcttcatgatggccttctacctgaagtacaccgagaaggcctgggtcatggaactggaatggctgatccaacagcagtgttaccagcaagagaagaaaagccggaaactgatgagcagctgccgggccttcatccacacacctagaagccctggctgcagcgtgtacgccaatatgtgctgggccttttggaagcctcctagccagggcatcagctcttgtctgatgacaggctgttggggcagccctcctctgcacctgtgtcagcctctgaggcggtataagaaaaggggcgtgatcgcctggcggcggagaaagtggcagatccggcatgtgctgaaaaacctgatcctgtttcatgtgcggaacatcgtgtacggcatccaagtgatgctgtgcggcaagggactgacacaccctgtgcctctgaaacggaccctgcagaacaagaggaacaagaacatcaagcgggtcaaccagaagaagggcaacatcaagaggaagtccatcctgctgcacctcattgtgctgaatagccccgagagcaaccccaagttcttcctgacctttagccagctcgagaagaaagctacctggatgagaagaacaggcgccctgagagccacagctcctgctacagcagctcctcaggctcagactcctcattggagagccgccacaacaagcagcatgagcagcagccctagagccgagcctacatcttctagctcttgggccacctgttggcccagatgctgtagctccagctgttactggtccctgagttcttggcctcctgctggcgccgctgaggctacaaacaccagaactagaagcagagagtcccagcggggcagaatgctgacttggagaagtagtctgtggctgcagggcaccagatgttttacaggcgtgcggacaagcagcggaagctgtggcagagcttgtagctgcggaagaggctgtggaacccctagaggcgattggaagagacaccctcctcggaggaatagcgtgatcgtgcacaagatcgtgctggtgtttctgaagtccctgtccagctacaactgcgagagaaggatcagcggcatccagaagagagccatcgagtttgccgtgctgaaactgctgaatatggacctgcactggaactccgcctacctgggcagaactctgctggtcacctgtatcctgtatcaccggtggatcgtgacctccatgtgccagtctcagagatggctgaccagcaccacaagcagatccagcgctctgatgtggacccggcagatcaatcggaggaagctgcagagaaagaagaggcacccaagctggccttggaccagatgccttagaatgaggcctcctagaagcggctacccctacgatgtccctgactatgcgtcc

SEQ ID NO: 1137 - DNA, 5247 bp, Artificial Sequence
  Polynucleotide encoding the hINV- and HA-extended poly-FSP polypeptide 3B
atgcatcgacggcgctcacggagttgccgggaagaccaaaagcctgtgatggacgatcagcgggaccttatttctaacaatgaacaacttccgatgcttggtaggcggcctggagcaccagagtccaagtgttctaggggcgccctgtacactggtttctccatcctcgtgacactgttgctggcgggacaggcaacaactgcgtatttcttgtatcagcagcaaggaagactggataagcttacagttacatcccagaatctccaacttgaaaacctcagaatgaagcttccgaagcccccaaagcccgtctccaaaatgaggatggcgacaccgctccttatgcaagcccttcccatgggggctctgccccaagggccaatgcagaacgctacaaagtatggaaatatgacagaggatcatgtcatgcatttgcttcaaaacgctgatccccttaaagtttaccctcctctgaaggggagctttccagaaaatcttcgacatctcaagaacacgatggaaacgattgactggaaggtgtttgagagctggatgcaccattggctcctgttcgagatgtcccggcattctctggagcaaaagccgacggacgcacctcccaaggaaagcctggaattggaggacccgagtagtgggctgggcgtcacaaagcaagacctgggacccgtgccgatgggagctgctgctgcctcttgtcagtctcctccttctcctcgggaaaccacacctagctccgacgccaccagacggacaagaccaattgccgctcagagcaagaaaaccatgacagccgccggactgacccctaagaacaagaagcggagaaagctgcggcccaagatgatccggaagatccagaagagaaggcggaccgccaaccggcggaatagcagaagggctacccctacaagcaagggcagcctgagaagaaagtacctgagagtgcggggacctcctctgcacacccggaacatcagaaagctgatctggaccaagcagcggagcttcctgtctctgttccccaagctgagagccaccgagcagatgaccaatgtgggctgctctatccctcacgtgcccaaagccacagccgctcactctgtgacagtgaaactgcagctgcccctgaccttcagcaccctgctgtgggatagcagacacaccatgagcctgagcaacatcctgatgaagttccggctgcagtctagcccattcctggccagatcctggaacaccatgcagtggaacaacaagaaaatggccatgaccgtgatcgctggcgcccaccactgtcagtacaagctgacctacaccaaagtgtggaagatgaactggaagaaaatgatgatcggcagccagcatctgctgttcagccctctggatagcagtcccctgcagctcctgctgcaccctcacggcaagagatgcaacccttgctgcagactgacctggatgagccagaacaccagaagcaccaacctggaaaagaaccccagcctgaagaagcagagccagcggagaggaaagctgagcgcctttagcggcagaatcctgcaccagccagaaatggccgccatgagactgatgcccaagttcctgaactccaccaacagctggtggaccctgaccacactgagcttcgtgctgatcgaggaagccagacagcccagcagacctaccggcagaacacctaccaccagactgatggcccctgtgggcagcgtgatgagctgttctctgctgacccagccttctccagccagcgcctgtacaatgcctccactgctgcatccacagtgggcccctcatagtgctggactttctccaggcgcttgcagacctgcctgcacctgtatcagcatgaccaccatcagcagggccacatggggcccagtgtactacgtgtgcaaccggatgaacgtgtccagcgtgctgaagcccttcctgttcaccgtgcctatcgaggacatgagagagtgcaccctgggcagaaacagaatgaatgtgtcctctgtgctgaaaccctgtctgatccctgtgccaatcagcgagaagaagaggaagctgcccaacatcgagatcacccctcagcggtctaaggccatgctgcagaagcagtgctgctacaacctcgtgatcaagcaccctctgatcttcagaatcaacctgcggcggcagggcaagaccaaagatggcgttgtgcagagcctgggcttcctcaaccagcagatcatcctgcagaaagagttcttcatctgcctgctcatgttcatcaagcggtggaagcctgccgccaccaagagcagaaagaagggccacaccaagaacagacggaaggccaagagaaagccccagatctacctgttcttcctgaccgtgtgcggctttcacctgaaaaagaccagcgccaagtggctgaagaagtccaccaagtccagatccaacggcatggaagcttgcggcacacaccccactcctagactgagctgcctgagagttagatgcggcggctggctgtgtggctggacacctagaggtagaaagtccggcgtgatgaagtgctgggatctgtgccccgtgcacaagaagagaggcctgttcagactggattttcaccccagaagcagctccggcaagggaaagaacagcccctgctgccaaaagaaactgcgggtgcagaaccagggccatctgctgatgattctgctgcacaatgaccgggtgttcctcgtgaagatcggcgagaagctgaagcactgtttcaaggcctggggctccagacggaaccggcggtacagaaagatctacggcgagctgaagatgtccctgcaggccttcctgatccacctgagaaaggtggacacccaccacctccaggtggtcaccaaaacagtgaccgccacaacagccgacggccagagaatgcggagactgaagtgcaaggcctgccggctgagatgggccagacctgaacctgctgctcaggcccctcctaagagccactttccacctcatcctagcggccccagcagaacaagtagcctgcagctgagaagcctgttctttagccactgcctgtgcagccagaagaaggaccctgccggcaagctgaaaaagctgctgaagaaaagcagccagctgcggagaagctggcgcaatgtgtccagaatcagcacccctcctccactgatcctgtggcctcaagctgctcctgtgtccgtgatcaccatgaagctgtgggagaagcacttcaagggcctgaattggaacctggtcgtgtggattctgaacctgaagatgatgacctacatggaaatgcactacggccatcaggccccacaggtggcaatgctgcctaagctgctgtgcagacagatgctgcccactctgagcacactgcagcagagacatcctcagggcccttgtcctcctcctgtgacacctctgagagtccagtctgtcctgctgctgggagtgcctcagacagccagaggacctagaagaaaggtcctgatggtgctgtggctgcccgccaatcagtctctgcagaaaagccaggttttccagtgggtgctgcggacagaggtggcccctagatgtcctagatctgccgtggacatcagccccggacctacatctcctagcctggcctcttgtgcctctgtggccattggaaagctggcactgcttggcgcctctgctccttgtggtgctgctggcgctagagaggccggaagatttgctgtgctgggcaccatggtcatgaagctttgtttcttctacctgctgtaccggctgcgcatcccaagcctgaggaagtacagacagcacctgaaccggaagctgcacctgacaagatcctgcctgatcgatctgaccatgatgatgtcccagaagctctggaagaaccagcggaagagaatccctctgccatctccacggcaacatctgctgccacagtaccctctgcacccacctccaccttgtctgctgttgctgcaccatagacaccacctggcctttctcgagatggcctgtagctctcagcacacccacagcatcaagatctggatcagcttcagccatgaagtggaccctccaggcagcgtgtggatactgccttgcgatctgcctcggatgctgccaatctcttcacccctgcacagaccccagatgcctttctggacctgcacctttcctgccacaacctggggcacatgggagacaccttctacatggggctggcggactttcagaggcgctagcagcagcacatcccgggacagcagatccttcttcacctctgctcaccctagcaggccctgcagaatgagactgtaccagtgcaagaagaagctcctcctgaaactgctgaccaccaccacaagcagccccagaagatcccctgctctgagagcaagaggcggcaccacaatcggcgaagtgaccagctgtaccaacctgagcgtgcccatgatgctgaccatcctgatttggaagcgggtgttcatcctcctgctgagcgataagaagggcgccaagaagatcaccttcctgcctattcctccacacctgagacaccctctgctgctgttcgagaagaaacggcctgagtggctgagcatggacctggacggaatgctgacagtgatcggccagggactcgtgggcatgacccctagagatctgggaacagtggcaggcgccaccgctcagattcagcgacctatccaggtgcagactggcggcagactcagaagaaacctgcagagaaacctgaaggtgctccaggtgtccgtgtacagcggcaacctgctgtcctttagcagacggggcatgaagtctagcgtgcggctgaaaaaccgcgagtgggagaaacggaagcagattctcggaggcggcggaaagtacaaagagtacttcctgaagcgcatcctcatccggaaggctatgacagtgctggccggcgacaagaaaggactgggcagattcatgagatgcgtgcagagcgagacaaaggccgtgtctctgcaactgcctctgggaagaaacatggaacaccggttgaccatggacagcgccctgagcctgacaaagagagagggacccgagacactcaaaaagaaatacctggtccagcaccagatgaagtgtctgaccgccgtggattgtctgcaggctttttgggacatgggctacccctacgatgtccctgactatgcgtcc

SEQ ID NO: 1138 - DNA, 5250 bp, Artificial Sequence
  Polynucleotide encoding the hINV- and HA-extended poly-FSP polypeptide 4B
atgcatcgacggcgctcacggagttgccgggaagaccaaaagcctgtgatggacgatcagcgggaccttatttctaacaatgaacaacttccgatgcttggtaggcggcctggagcaccagagtccaagtgttctaggggcgccctgtacactggtttctccatcctcgtgacactgttgctggcgggacaggcaacaactgcgtatttcttgtatcagcagcaaggaagactggataagcttacagttacatcccagaatctccaacttgaaaacctcagaatgaagcttccgaagcccccaaagcccgtctccaaaatgaggatggcgacaccgctccttatgcaagcccttcccatgggggctctgccccaagggccaatgcagaacgctacaaagtatggaaatatgacagaggatcatgtcatgcatttgcttcaaaacgctgatccccttaaagtttaccctcctctgaaggggagctttccagaaaatcttcgacatctcaagaacacgatggaaacgattgactggaaggtgtttgagagctggatgcaccattggctcctgttcgagatgtcccggcattctctggagcaaaagccgacggacgcacctcccaaggaaagcctggaattggaggacccgagtagtgggctgggcgtcacaaagcaagacctgggacccgtgccgatgatccagaagaagaagcagaagtccaacctggacctgcagcaccagcgcagacgcaaaaagaagaaggacaaggtcgagatccggaatcggagccccaaggccaatagcacagagtgtcagggcgagcacagcagagagcagaacctgctgaatctggtgcagctgaaccctcacagccctcaccacagaaaggacgaagaggaccaccagaagcggcaccaccaccacaatcaaaagaaaatgagcgtgatggccaagaagtcccagcagcctctcggacaggcctttggctctctgtgtcagctggtgtccgccgatttcagcgcccctcaagtgaccagactgcggagcctgaaccatctgctgatcaacgagggcaacaaccactggcctagagtggaaatgcctaccggttggctgctcgtgggctacaacaccagaaacacagcccagaatcctcggctgcagcagcacctgaaacactggcagcagtgcaccagagccagatggtgccaagagccttgtcagaccctgaccttcttccatttcttcttctttttcaaaacggtgtccctgtgctgccccggctggtctaaaggacaacctcctccacctggcctgaagccttctagcctggcttctcaggtggccagaaccacaggcgtgtaccagcacgtgtggctgatctgcttcgtgttcttcgtgtgcgtggaaaccggcttctgtcacgtggcccaagtgggactcgagagactggtgtctctgagcggcatcaccgacgtgaaccattgggcccagcctaagccatctcctagcaaaggcaccggcatgaacagacccatcggcctgagagttggcaaaggcgtgtgggccagactgagagcctccgtgtctttctggaccctgctgcctacaacaggcgtgcggacaagaggaagccctctgagactgacactgtggcctccacggaacatcctgaacagcctgcctagcagcatggaaatcgccgtgctgcaagagaaccgcaagaccagaaaggccgccagagagaagcacagaaagaccgacaacctgcacctgtgctactaccacagccagagcaaccggaacaagagccggcagatggaaagcctgggcatgaagctgcagagccctctgtgggattgctccaccacaacaggcacacaccacggctgtctgtgggagatccctagcgttacactgctggcctgcagagtgaacgccgtggaagaactgcacagcaggcggatgtctgtgcggatcgtgaagaactgggtgtcctgctgttacgtgcgcctgtctgctgtgggcctgtctacttggagcgccctggacgtggtcatcaacctgaagcggctgcagaagttcagccagaagtctcagcaccactgcgccctgagaaagatcgagtgggccacaaagctgagcctcggcggaaaagctggaccccaggctcaagagaaggccaacgccaagaagatgcccttccagcggtggatcttcagcaatcagctgaccgtgcagatgctgtgcctgcctattgaagccctgactgccctgttcacctgtcggacagccagcatcagcgtgaacatcagcaccctgatgagcatcctggaagcccctctgttttttcacggcgacctgtgcgaggaaaagaagaacggccggatcagcagccaggctcctctcagactttggtcttggtgcggcacaagccagacctactttggcagcaccgccaagaaaagccccaccagcttttgctgcgagtggggaggacaggctcaccggcagagaaataccggaatggaaatcctgctgtggattctgctcaagatggaaattcagatcttcaagatttgcctgggcgagatgcagctgtgcacctacacaccccacatctgcagacacacctgtagaggcggacctagcgccagcgatagatgctgtagctgtagccctagcggcttcagcgccggaagaggcagatgtccagttcagggatgtctgcggcctcacagagtgcagctgctgagaagatggggccctggatctcctgctggccagagactgtctaagggctttcagctgctccgttggtggggaccaggatctccagctcctgagcctagaaagggcccatttccaccacctgatcctccatggcctgtgaccgctgtgacagtgatggctggctctgtgcctagcgctcagtctgtggatgctctggaaagccctggacctctggcactggaaggacctagcagccccagaaacctgctctggcgggaaatgagcatcttcctgcctggcatcttcacctctcggattctgaacctgcaagtgctgaagaagatcctgcggagctttatgaagctgtaccactctctggtcatgtgcctgcggctgcggaccaagctggaaaaagctctgagcgctctgttcatctggccccagcacagctacaagcagaggcctcctctgcagcctgtgcaggtcgtgctcagactgggaaacctgcctccattcttcagaggcagcgaggtgccctttcctagaccttgccggaccaagatgctgaaccagaagtgtctggcccctttcatcacacacccattcgcctctcagcccctgggacaagagatgcccaacaacacccagatcagactgctgaagcccctgctgacccctgacaccagatggatcttctccaaccagctgcagacagtccagatgctctgtctgccacctctgaagcagggcgagagaatcatttggcccctcggcggctttcagatccccaacttcttttggagcctcggaatcggccacactggcgcctggtggcatactggaaggcggagaagagaatggggcggctccaccgtgtctagaagcccactgtggatcagctccatgatctacctgagaggcatggccttcgccagcgacagctccatcagaaccaccagagtgtcctggtgcagaagatgcggcgccaaatctgccgctgcctccagcctcaagaagaaaccccgggacatctgtcggatcagcgactctaagaagatgacccagaagcgcgagagcaccctgggcaatttctggatgaagctcctccagctgccagacaagaagaagaagtctaccgaaaagaccaagatcatcaagaagatgaagaaacggatcatggtccacatgtgcagctccctggctctgccaacaggcctgacatctctgatcctgccaagcagcgatctggccgtgctgatctctagctccaccagccactttctgatgcggagcccagtgctgcctagctccagactgacttgtgcctctccacagctgcccagaatgtggacctggtccagctggctgaagtggctgaaaaactggaagcggttcaagcttaaaaagaagtacatcctggccatgacgctgaccctgaacgggcatccaagaaccgcctctatcaccctgcctaccaccagcctgaagggctctagaaccagctgttgccccagatctcaccccagactgcctaggacaaagtggcctctgcagtgcctgctgcacagcctgggaacaactggaacactcgtgtgggaaaggggcgtgctgcagatgagaagtctggaagctcactgccctctgcagaccttccacctccaccactgtagaactcagcccagctcttgccctcctgcatggattctgtaccaaggacagtggagcggagccgtcgtgggacttagacctgtggctcaccatctgccaagacctattcagggcctgcactgcccacaggctccacatcaaccagctctgtcttggggcaagtggcccgtgggaatgacaggacctgccagatgttgccggtggcctagacgggaactcaaaaagaatctgctgctcccctgccggtgcagacgcgagtatagagtgacaatgggccaagccttcggcagctttagcgccgactttagcgctccccaggtgttgaagaagaatcggaagcagaacaagattatctgcaagggccaccgcatcacaagcctgatcctgagctttcagcgcgtgaaacttaagaagaaagtcaacgcctgctctcccgcctgcacctctaaagcctggactcccagaaagctcgtggggagagccgtcagaagaaagggcatcatctgtatcaagaatatgttcctgcagcggaagggtttcctgaacctgagccacgtggaaaagttcgtgcctccttctcctcctctggctctcggccctagaatgcagctctgtacccagctggcccggttcttccctatcacacctcctgtgtggcacatcctgggacctcagaggcacaccccttgtcaaaagaaggtgccctccgctagcccatggggccttagaccatctccttgcctgagctggtcctccagaattgtggcccctggacacgccctgagctgtcggactagaagaagatggtccagcaagggctacccctacgatgtccctgactatgcgtcc

SEQ ID NO: 1139 - DNA, 4690 bp, Artificial Sequence
  Cloning cassette hTPA 1A
gaattcggatcccgcgacttcgccgccatggatgcaatgaagagagggctctgctgtgtgctgctgctgtgtggagcagtcttcgtttcgcccagccaggaaatccatgcccgaaccgagatccagctgaccatgaacgacagcaagcacaagctggaaagccccgctctgaaacaggtgtcaccagcctctccacctactcagcagcctcagacacctcaggattctagacaggtgctggccctggccaagaaaaccctgacaaatgcctccagagccggacagtttcctgtgtggcggagaacaagcagaggcatgagcctgcagtggaagtccggcaatgcctgcacacctctgagatgccctagcagaagccctgccacattcctgacagccctgaatggctggcacagatctggcctgagagcccagatgcctagctcttggtctagcagcggcagaacactgaagctggcccctctgcaagtgaccaccactctgaagctgatcctggtcatgctggaaatcgtgaccgagcgctccctgctgtactccagaatgtgtctggtgcagatccccacacacacctgggagcccgattacttcgtgtccctgcctatgatgttcagctgggccacacagtcttttcccgtgggcgccgtgtttctgaccagacctgccattccttgctgcagctgtaccagccacagcaacccttggagccagagcaatcagcagctgaagtggacccctcacatcctgaagtccgccagcttcgacaagaaaggcttcgtgatcctgagccggcggagcaagattgaggcctctcctatcggctctatcgccagctctcctggacatcctctgggacctacactggccatcagattcatcagcgcccctcagcctagcagctctacagtgacagctgcccctagcggccagtactttatcgccaagaagcggatcaagctgcggcggaacaatatgggcggcaacagatccatctgcctgaccagaaagcgcaagagagagaagcggagccagaagtccaggcagaaccatctgcagctgaaaagctgcagacggaagatcagcaactggtccaagctgagaagcccctggatcttcaccaagtgcgagatctgcgtgaagaacaccgccatcctggctatcaccctgatcacccctcaggaccctcatctggaccctgtgtgtcaccctcatagaaggcctggatggaagggccaccatagagtggtgttctctcaccatcctagcggcagcacaaagagccactggcagcaaagagaacgcggaggcggcagacgcgagaagaagggatgtagagaacagcggaaggtggtcaagaacccctctcagcccgtgcctctgagaaacgatggcatcaccaacggcaacgactccaccagaagctgctccatcagcctgaagaaaagcctggaaaagatgcccctgatgcggagagccagacctaccagctgtagcacctgtagaatgtggtggaagggcaagaaacggcggaaagaaatcgtgcctatgagcctggcctgcagcatcaccgtgtcttttgtgggacagatcagcaccctggtgctggatgtgtctagcatcagccattggcggctgccctgtaaagtgaccgagagcagctccagcttcttctacaccagcgacaggacccctctgagcatcagcagaccaaccagcagagctagacagagctgttgtctgcccggactgacacaccctgctcaccaacctctgggcagcatgagcactagaagagagatgccaagccaggccacaccttctccacctggaccttggagagccgctctgggcaaagaagtgaagagatcccagagcaagctgcgcctgagaaacacaagccctggggagaagaacgatctccagctgttcgtgatgagcgacaccacctacaagatctactggacagtgatcctgctgaacccctgcggcaacctgcacctgaaaacaacatcactgcagcggccacctcggagcatcctgtctctgaatggaatctgggaagtgatgccccggacactggaaggctgcatcagcgtgaaggatcacagaaccagccagaaccacagcaagtgcatcaccgaatgtgtgcggactgccctgaacgtgtccaagaagagactgcctaagctgatgaagaagaaggacagcaccatcttcatcaacaaagtgcgccagaacttcaagcgcaacttcaagaagaagaaacccctcactttcagccccagcagacggatgactcggagaaccatgacaaccaccaaaatgatgatgatgcggcggaccaagcggagaaggcgcaaaaggcggagaatgaccatgatgaccagacggaccctgctgacaaagaaaacctgtctgacccctagaaccagcgccgccacaaaagctctgcctagacagaccatcagccagcggaggcctattcagaccccacctggaacatctctggccatctggggcagaacaagactgaccctgacaggcaccagatccagcggaacaagagcctctccttccgccgtgtgcctgtgttgttggacctgtccaagcagaagcttcccagccgcttctcctagtggactgagagcacctgttggagcccaggctcctcctgaagtgacactgagagcctcttgtgcctctagcgcctctaaagcctgtgctggactttggccttggggagcccaagttcgagttggagctggaacaggcggaggacctgcttgtgttcctgtggctgaagcttctacaggcgcatggacagctgaaggcgccgctggaacaagatgtagagcctctagagccccttgccgccaacttcctgctagctcccctaccaagtgtgaaatttgtgtgaagcgcagacggcggagaaagagaagcagccagtctagaagccccgtgcctaaaaagcgcgagaggatgatgctgcctgtgcgggccagaacagctagatctgcacttcctcagggcagagcacctctggaagggatgctgcttcctagagcactgcctagcctgctgagcagaatgcctgccagaagagagtcccggttttggctggctctgcaggcacttggactcagacctccacatctgcctagctgtcatcctctgcctcaactgttgggccctccacctcctcatcaggccccaatgacactgaaggccctggttaagacctggacacagttccgcaactaccccagagccgacaagaagaatgtccggtctaccgccttcttcctgctggacatcatcctgggcgattgcccaagaacaatggccggaccttctgcctctctgcatcctgcatctggcagagcctccagaaagacctggcagagaaggctgagagcttgtagagcaggcggacctgctggatgggctagacaggcctatcctagactgaaaaccttcggcgtgcccctgggctctattctgtgtctggccggcagcctgtccacaatgatgatcattagcaccaccagacaagagtgcggcaggcgggcttctgtgccttgtagacctatgatcggaagcgccagaccaggaccttggcggacatctgctatgcctagtgccatgggagtcgccctgcctacctcttgtgaaagcggaagatctcctcctgccaccggcggaagaatgccaggatctcagtctatcatgatgagctggatgcctccactggctccatgtgccgcttgtccatgttctcccgctcctacactgtgcccagcacatcctgctagagcaccaacagccgtgcctgcctttacacctctgtctgctcatcctgtgccagtgctgtctggatgtcacctggccgtcagaacctccatgctgacactgctgcccatggaagccaaaaagagcatgaagcggtccaacgctaagaaaatggaagatatgatctgggagagccggctgccactgaggccacaaagaggacctagacctctgcacagatggctgcagcagacaaccggctgtagccagaggcggatcgtgttctttctggccccatacttccctcggcaccctcacagatctccaccaacatcttgcccacctctgctggaagctttcccactgccaagagcttctctgagggccacagtgccaagacatagctctgttctcgccaccggtctgcacctccacagacagatttctctgcccctgagaggattcctcctgcaccaaccactgccaggacagcatctgtggctgtctcacagactgaggctgagactgcccaggacacagccatctttgcctggaccatgtgcaagcctgctgtccacactgtctcagccaccacctcaggctccatctcaagtgtggactgccgctacactgagatgtcctgctgttcctgcagctgcctgtcctcctgctctgagatccatgcctaagagccggaaccaggtgctgttcagacggaatctgaccccaagccagctgagaacactggccccaccttatatgctgctgccccagtctctgtcccagagcctgagtagaaagcagatccctagccagtccatgctcgtgggctacccctacgatgtccctgactatgcgtcctaaaggcgcgcctagcggccgc

SEQ ID NO: 1140 - DNA, 4672 bp, Artificial Sequence
  Cloning cassette hTPA 2A
gaattcggatcccgcgacttcgccgccatggatgcaatgaagagagggctctgctgtgtgctgctgctgtgtggagcagtcttcgtttcgcccagccaggaaatccatgcccgaagaaagatgcagagcctgaatcaccccagcagactgaccaatggctctcctccactgcacctgtgccagcctctgagaatgagcagaacccctcctagaagagtgtgcgccgctcctccacatagactgctgggcccttccagatggaaccctcggagaaagacctggaagatgcggaagaagtacgcccagaagcctagccagaagaaccacctgtacggcggcaagaagcgctctaagttcagcagaagccacctggacttcagcccctactggatgaagaaagtgaaggtgctgttcaaggccgaccagagcgagtctagcctgagcagcggaagatgcagcctgatggaacagatccctcacctgaagtctcggcggaagtggcagatcagacacgtgctgaagaacctgtggctgcccatgagaagcctgggagaaccttggagagccggctttcagtggggagagtctccttggcaagtgatggcctctctgaccggcagagccacatttctgctggccctttgggaatgtagcctgcctcaggcaagactgtgcctgatcgtgtctagaaccctgctgctggtgcagagccggaacaagaaaacaaagctgtggttcagcctgatcaacatccaccaccggaagaacccactgctgcctatgagatggtggtgtaccagaggcggcggaaagcggaaaaagaaaatgtgcaaggtgtccggcggctgcaccgcctgtgttgagagatgtccttggaagggcatctgctggaagtggcctgtgacagtggccgccattagaatgtgtgccctgtctcaccctagcttctacatcagcagcaccgtgtgctttctgagcaagcactgcatgaccgcctgcaccagaaagagaatgaagaccggcgccatccaagagaagggcgctattcaagagaaaggggccatgaccaagcggatctgcgtggtcaatttcgaggcctgcagagagatggaaagcctgagcgcccctgagaagatcaccctgtttgaagcccacatggcccggtgcacctccatcaatgtgctgtgtgtgcgggccagcctgattgagaagctgatgaaagaaaagcgcaagatgaagcggaaccaggtggcctctccacagatcatgcagcggctgttcatcaagggctaccagaacaaccacttcaccttccatctgcaaaacttcgccttcttcagctccttcggcaacaacaagtacatcaatatcctgaccatcctgttccacgtgcggaacatcgtgtacggcatccaagtgatgctgtgcgctagccctcagattatgcagagaaccagcgccgaccggttccggatgaagagaagaatgcagaatctggacaacctgggcgtgccatggcctctgttgcctggaatcccatctctgaacgcccagtggatgttcctgagaatcgcatccccgcaaatcatgcagaggatgagcgccgtgaacttcgagacaatccgggccagaaaccggaacatgaagaaaaccatgagccacctgatcgcccatcaggccctgaagatgagcggcctgagactgtttcaccccagactgctgacacggaagaagcccggaaaactgctgctcgcccatatgtacggcttcagcacctacggcacccagaaaggcgagtgcgtttgtctgcagtgtctgagcggcagcagcctgttcattctgaagcagcccctggacctgaagatcagcaagaccttcatgggccacagagagggcagcgagtctgataatctgggcctgctgtatagcttccctccaccttatcctatcagcgagggcctgaccatgaccaccggcagaaacatcaacagcaactccctgatgaccaactgcctgttcagccccatcttcctgtgccaccacgccatcatgcacagaaagatgacaagccctcacttcaggctgttcagcagcaagatcccacatcctcaggtgccatctgtggtggccctgtgcaagttccgggccttcatccacacacctagaagccctggctgcagcgtgtacgccaatatgtgctggcccaagttcttcctgaccttcagccagcagtggtccagcgtgacatctctggaatggacagcccaagagagaggctgcagcagctggctgatgaagcagacatggatgaagtcttggagcctgcgggaccccagctacagatccatcctggaatacgtgtccaccagagtgctgtggatgcctacctctaccgtgctgcaggctcatccacaagttccagctctggctcctcaagcctggtggcctgctagaagaggacctctgacatctgccccatccgctcagcagtccctgaccagagagaagattatcaaccccaccatcagctgcccctttcagagccccaccaagagactgatctaccctcctagcacctgttctctgccctgcagaggcttcctgcctagcagatttccttggggcccacctcctctgaacagcgtgatcgtgcacaagatcgtgctggtgttcctgaagtccctgtccagctacaactgcgagcggagaatcagcggcatccagaagagagccatcgagttcgccgtgctgaaactgctgaatatggacctgcctctcgagaacacacagatccccagaacaagcccactgtggaagatcacaatggtgctgacataccccaactgcgtggtgcatgtgctgatgtttggcgccctgagagccacagctcctgctacagctgcacctcaggctcagacccctcattggagagctgccacaacaagcagcatgagcagcagccctagagccgagcctacatcttctagctcttgggccacctgttggcccagatgctgctccagctcttgttactggtcactgtctagctggcctccagctggcgccgctgaagctacaaataccagaaccagaagccgcgagagccagaggggtagaatgctgacttggagaagctccctgtggttgcagggcaccagatgttttacaggcgtgcggaccagctccagatacaagaaaagaggcgtgatcgcctggcggagacagatcaatagacggaagctgcagagaaagaagcactggaacagcgcctacctgggcagaacactgctggtcacctgtatcctgtatcaccggtggatcgtgacctccatgtgtcagtcccagagatggctgaccagcaccacaagtagatctagcgccctgatgtggaccgagctgagcctggaaccatggattccctacctgcatcagcagaaaacccagcggacactggaatccgccggactgtttccttggctgcacacccagtgccaagagaagaaaagcagaaagctgatgtccagctgcacacacccctgcacaatgctgctgccacagggatgtcatcctgcctggctgagccctatctctgcctgtccaagactgctgccatatccttttcacgtgctggctctggaagtgacctttcctcctggaaccgccatgcctcagatgcagttgcaggctctggctatgtgggagaaaggctgggataagcctggcaccagcctgcagtgctacctgaacagaagaagaaacagccggaagcagagccaggtgcaactggccattcaggtgctgctcgtggacaagcacaagtactttctgttcggccaaaagaaaggccacatgatctttagcctggccaacggcctgtggtttaacctgattttcaactcccggaagaaactgctcgaggacatgaagcaaaatggcttcaccggcaaaggcctgacacaccccgtgcctctgaagcggactctgcagaacaaaagaaacaagaatatcaaacgcgtcaaccagaagaagggcaacatcaagcggaagtccatcctgctgcacctgattgtgctgaatagccccgagagcaacctgatcctgatccagcatggcggcatcttcacctttcggttctgggtcgagaagctgtcctggaacatctgcaagaacctgagcctgtacctggacaagttcgtgcagagactgctgtacgtgtacatcatcgagacaaacgtgttcgtgctgaacctgtttcatgtgcccgtgaaccagatcttcatgatggccttctacctgaagtacaccgagaaggcctgggtcatggaactggaatggctgatccaacagcagtgctatcagggcagctgcggcagagcttgttcttgtggaagaggctgtggcacccctagaggcgattggaagagacatcctcctcggagagccttctggaagcctcctagccagggcatctctagctgtctgatgaccggctgttggctcgagaagaaagctacctggatgcggcggacccgccggaagaagagggaagatcattgcggactgagacaccccagctggccttggacaagatgtctgaggatgaggcctccaagaagcggctacccctacgatgtccctgactatgcgtcctaaaggcgcgcctagcggccgc

SEQ ID NO: 1141 - DNA, 4687 bp, Artificial Sequence
  Cloning cassette hTPA 3A
gaattcggatcccgcgacttcgccgccatggatgcaatgaagagagggctctgctgtgtgctgctgctgtgtggagcagtcttcgtttcgcccagccaggaaatccatgcccgaggagctgctgctgcctcttgtcagtctcctccttctcctcgggaaaccacacctagctccgacgccaccagacggacaagacctattgccgctcagagcaagaaaaccatgacagccgccggactgacccctatgatccggaagatccagaagcggcggagaaccgccaaccggtgtctgagagttagatgtggcggctggctgtgtggctggacacctagaggacagaacaccagaagcaccaacctggaaaagaaccccagcctgaagaagcagagccagcggagaggaaagctgagcagcctgttcttcagccactgcctgtgccggaacagcagaagggccacacctacatctaagggcagcctgcggcggaagtacctgagagtgcctattcctccacacctgagacaccctctgctgctgatggacctggacggaatgctgaccgtgatcggacagggactcgtgggcatgacccctagagatctgggaacagtggctggcgccaccgctcagattcagaggcctattcaggtgcagaccggcggcagacttacacctcctcctctgattctgtggcctcaggccgctcctgttgatcctcctggctctgtgtggattctgccctgcaagaacaagaagcggagaaagctgcggcccaagcggctggactttcaccctagatcttctagcggcgtgtccgtgatcaccatgaagctgtgggagaagcacttcaagggcctgaactggaacctggtcgtctggattctgaacctgaagatgatgaacatcgagatcacccctcagcggagcaaggccagaaagtccggcgtgatgaagtgctgggatctgtgccccagcgagaagaagaggaagctgcctctgcctctgaccttcagcaccctgctgtgggactctagacatagaggcgccagctccagcaccagcagagactccagaagctttttcaccagcgctcaccccagcagaccctgcagaatgagactgtaccagttcctgatccacctgagaaaggtggacacccaccatctgcaggtcgtgaccaagaccgtgacagccacaacagctgacggccagagaatgcggagactgaagtgcaaggcctgccggctgagatgggctagacctgaacctgctgctcaggcccctccaaagagccactttccacctcatcctagcggccctagcagaaccagttctctgcagctgcggagcatccctcacgtgccaaaagccacagccgctcacagcgtgacagtgaagctgcagaagggaaagaacagcccctgctgccaaaagaaactgcgggtgcagaatcagggccatctgctgatgatcctgctgcacaatacctacatggaaatgcactacggccatcaggccccacaggtggccatgctgcctaagctgctgtgcagacagatgctgcccactctgagcacactgcagcaaagacacccacagggcccttgtcctccacctgtgacaccactgagagtccagtctgtcctgctgctgggagtgcctcagacagctgctagacagcctagcagacccaccggcagaacccctaccacaagactgatggcccctgtcggcagcgtgatgagctgttctctgctgacccagccttctccagccagcgcctgtacaatgcctccactgctgcatcctcagtgggccccacattctgctggattgtctcccggcgcttgcagacctgcctgtacctgtatcagcatgaccaccatctccagagccacctggcaggtttccgtgtacagcggcaatctgctgagcttctccagacggggcatgaagagtagcgtgcggctgaaaaacagccggcggaacagacggtacagaaagatctacggcgagctgaagatgtccctgcaggccgtggctcctagatgtcctagatctgccgtggacatcagccccggacctacctctcctagcctggcctcttgtgcctctgtggccattggaaaactggccctgcttggcgcttctgccccttgtggtgctgctggcgctagagaggctggaagatttgccgtgctgggcaccatggtcatgaagcacctgaaccgcaagctgcatctgacccggtcctgcctgatcgatctgaccatgatgatgagccagaagctctggaagaaccagcggaagagaatccctctgccatctcctagacagcatctgctccctcagtaccctctgcaccctcctccaccttgtctgctgctgctccaccacagacaccacctggcctttctggaaatggcctgcagcagccagcacacccactccatcaagatctggatcagctttagccacgagcagagcagcccattcctggccagatcctggaacaccatgcagtggaacaacaagaaaatggccatgacagtgatcgctggcgcccaccactgtcagtacaagctgacctacaccaaagtgtggaagatgaattggaagaaaatgatgatcggctcccagcacctcctgttcagccctctggatagctctccactgcaactgctgcttcaccctcacggcaagagatgcaacccttgctgcagactgacatggatgtccatgctgcagaaacagtgctgctacaacctcgtgatcaagcacccactgatcttcagaatcaacctgcggagacagggcaagaccaaggatggcgttgtgcagagcctgggcttcctgaaccagcagatcatcctgcagaaagagttcttcatctgcctgctcatgtttatcaagcggtggaagcctgccgccaccaagagagagtgggagaaacgcaagcagatcctcggcggaggcggcaagtacaaagagtacttcctgaagcgcatcctgattcggaaggccatgactgtgctggccggcgacaagaaaggcctgggcagattcatgagatgcgtgcagagcgagacaaaggccgttagcctgcagctcccactcggaagaggccctgtgtactacgtgtgcaaccggatgaacgtgtccagcgtgctgaagcccttcctgttcaccgtgcctatcgaggacatgagagagtgcacactgggccgcaacagaatgaatgtgtcctctgtgctgaaaccctgtctgatccctgtgccaatcgacctgcctcggatgctgccaatcagcagcccactgcacagaccccagatgccattctggacctgcacctttcctgccacaacatggggcacctgggagacaccttctacatggggctggcggacctttcggggccctagaagaaaagtgctgatggtgctgtggctgcccgccaaccagagtctgcagaaaagccaagtgttccagtgggtcctgcggaccgagaacatccggaagctgatctggaccaagcagcggagcttcctgtctctgttccccaagctgagagccaccgaacagatgaccaatgtgggctgcgccttcagcggccggattctgcatcaacctgaaatggccgccatgcggctgatgcccaagttcctgaatagcaccaacagctggtggacctgtaccaacctgagcgtgcccatgatgctgaccattctgatttggaagcgggtgttcattctcctgctgtccgacaagaagctgctgaagaagtctagccagctgaggcggtcttggagaaacgtgtcccggatcagccaccagatgaagtgtctgaccgccgtggactgtctgcaggccttctgggacatgaacatggaacaccggctgaccatggacagcgccctgagcctgacaaagagagagggacccgagacttgcaagaagaagctcctgctgaaactgctgacaatgagcctgagcaacatcctgatgaagttccggctgcggctgagaatcccaagcctgaggaagtatcgccagcatctgaaaaagaccagcgccaagggcgagaagctgaagcactgctttaaggcttggggcagaggcccacctctgcacacaagaagccagaagaaagaccctgccggcaagctgaaaaaactgaccacactgagcttcgtgctgatcgaggaacggcggaacctgcagcggaatctgaaagtcctgtggctcaagaaaagcaccaagagccggtatctgttcttcctgaccgtgtgcggcttcttcgagaagaaacggcctgagtggctgtcctccagaaagaagggacacacaaagaatcggaggaaggccaagcggaagccccagatcgtgcacaagaagagaggcctgttcctcaaaaagaaatacctggtgcagggcgccaagaagatcaccttcctgtccaacggcatggaagcttgcggcacacaccccacaccaagactgagcgacagagtgttcctggtcaagatcaccaccaccacaagcagccccagaagaagcccagcactgagagctagaggcggcaccacaattggcgaagtgaccagcctgtgcttcttctacctgctgtacggctacccctacgatgtccctgactatgcgtcctaaaggcgcgcctagcggccgc

SEQ ID NO: 1142 - DNA, 4690 bp, Artificial Sequence
  Cloning cassette hTPA 4A
gaattcggatcccgcgacttcgccgccatggatgcaatgaagagagggctctgctgtgtgctgctgctgtgtggagcagtcttcgtttcgcccagccaggaaatccatgcccgaatccagaagaagaaacagaaatccatggccaagaagtcccagcagcctctggtgctgaagaagaaccggaagcaagagtggggaggacaggcccacagacagagaaacaacgccaagaagatgcccttccaagaggaaaagaagaacggccggatcagcagcagcctgatcctgagcttccagagagtgaaggacagcaagaaaatgacccagaagatgtgcagctctctggccctgcctacaggcctgacatctctgatcctgcctagcagcgatctggccgtgctgatctctagcagcaccagccactttctgatgcggagccctgtgctgccaagctccagactgacatgtgcctctccacagctgccccggatgtggacatggtctagctggctgaagcaccccagaaccgctagcatcacactgcctaccacaagcctgaagggcagcagaaccagctgctgcccaagatctcaccccagactgcctaggaccaagtggcctctgcagtgtctgctgcacagcctgggaacaacaggcacactcgtttgggaaaggggcgtgctgcagatgagaagcctcgaagcccattgtcctctgcagaccttccatctgcaccactgcagaacccagccaagctcttgtcctcctgcctggattctgtaccaaggccagtggagcggagccgtcgttggacttagacccgtggctcaccatctgcctagacctatccagggcctgcactgtcctcaggctcctcatcaacctgctctgagctggggaaagtggcccgtgggaatgacaggacctgccagatgctgtcggtggccccgcagatctcagaagtctcagcatcactgcgccctgcggaagatcgagtgggccacaaaactgtctctcggcggaaaagccggaccacaggctcaagagaaggccagaccttctccttgcctgtcctggtccagcagaattgtggcccctggacacgccctgagctgtcggactcgtagaagatggtcctccaagtgcagaggcggccctagcgccagcgatagatgttgtagctgtagccccagcggcttcagcgccggaagaggcagatgtcctgtgcagggatgtctgaggccacacagagttcagctgctgagaagatggggcccaggatctcctgctggccagagactgtctaagggcttccaactgctgcgttggtggggacctggatctccagctcctgagcctagaaagggcccatttcctccacctgatcctccatggcctgtgaccgctgtgacagtgatggctggctctgtgcctagcgcacagtctgtggatgccctggaatctcctggacctctggctctggaaggccctagcagccctagaaacctgctgtggcgggaaatgagcatctttctgcccggcatcttctgccaaaagaaggtgccatctgccagcccctggggacttgttcctccttctccaccactcgctctgggccctagaatgcagctgtgtacccagctcgccagattcttccccatcacacctccagtgtggcacatcctgggacctcagagacacacacctcaggtggtcctgagactgggcaacctgcctccattcttcagaggcagcgaggtgccctttcctagaccttgccggaccaagaacgagggcaacaatcactggcccagagtggaaatgcctaccggctggctgctcgtgggctacaacaccagaaacacagcccagaatcctcggctgcagcagcatctgaaacactggcagcagtgcacacgggccagatggtgtcaagagccttgtcagaccctgaccttcttccacttcttcttctttttcaaaacggtgtccctgtgttgtcccggctggtccaaaggacaacctccacctcctggcctgaagccttctagcctggcttctcaggtggccagaaccacaggcgtgtaccagcacgtgtggctgatctgcttcgtgttcttcgtgtgcgtggaaaccggcttctgtcacgtggcacaagtgggcctcgagagactggtttctctgagcggcatcaccgacgtgaaccattgggcccagcctaagccatctcctagcaaaggcaccggcatgaacagacccatcggcctgagagttggcaaaggcgtgtgggccagactgctcaagaagaagcctagagacatctgtcggatctccaacagaaagacccggaaggccgccagagagaagcaccgcaaaacagatagagccagcgtgtccttctggactctgctgcctacaacaggcgtgcggacaagaggaagccctctgagactgactctgtggcctcctagatgcagatgcagacgcgagtacagagtgaccatgaacatcctgaacagcctgccaagcagcatggaaatcgccgtgctgcaagaaaccgccaagaaaagccctaccagcttctgctgcaacctggacctgcagcatcagcgcagacgcaaaaagaagaaagacaaggtcgagatccggaatcggagccccaaggccaatagcacagagtgtcagggcgagcacagcagagagcagaatctgctgaatctggtgcagctgaatcctcacagccctcaccaccggaaggacgaagaggaccaccagaagagacaccaccaccacaatcaaaagaagatgagcgtcccactgttcttccacggcgacctgtgtagagagagcaccctgggcaatttctggatgaagctgctccagctgcctcagaggcctccactgcaaccagtgaccggaatggaaatcctgctttggattctgctgaagatggaaattcagatcttcaagatttgcctgggcgagatgcagctctgcacctctcggattctgaacctgcaagtgctgaaaaagatcctgcggagctttatgaagctgtaccacagcctcgtgatgtgcctgcggctgaggaccaagctggaaaaggctctgagcgccctgttcatctggcctcagcactcctacaagatcacacacccattcgccagccagccactgggacaagagatgcccaacaacacccagatccggctgctgaagcccgacaagaagaagaaaagcaccgaaaagaccaaaggccaggctttcggcagcttctccgccgatttttcagcccctcaaggacaggcttttggctccctgtgtcagctggtgtccgccgactttagcgccccacaagtgaccagactgcggagcctgaaccatctgctgatttggctgaagaattggaagcggttcaagctcaaaaagaaatatcaggcccctctgcggctgtggtcttggtgcggaacaagccagacctacttcggcagcatcatctgtatcaagaatatgttcctgcagcggaagggtttcctgaacctgagccacgtggaaaagttcgagcttaagaagaatcttctgctccccgtcgtgatcaacctgaagagactgcagaaattcatgctgaaccagaagtgcctggctccatttcctgcctgcaccagcaaagcctggacacccagaaaactcgtgggcagagccgtgcggagaaagggcattctggccatgacactgaccctgaacggaatcgaggccctgacagccctgtttacctgtagaaccgcctccatcagcgtgaacatcagcaccctgatgagcatcctggaagccatcatcaagaagatgaagaaacggatcatggtgcaccggtggatcttctccaatcagctgaccgtgcagatgctctgcctgcctctgctgacccctgacaccagatggatctttagtaatcagctgcagacagtgcaaatgctgtgtctgccacctctgaagcagggcgagagaatcatttggccactcggcggctttcagatccccaatttcttctggtccctcggcatcggacacactggcgcatggtggcatactggtagaaggcggagagagtggggcggctctaccgtgtctagaagcccactgtggatcagctccatgatctacctgagaggcatggccttcgccagcgacagctccatcagaaccaccagagtgtcctggtgtcggagatgtggcgccaagtctgccgcagcctcttcttctccactgtgggattgcagcaccacaaccggcacacaccacggatgcctgtgggagatccctagcgttaccctgctggctaacctgcacctgtgctactaccactctcagagcaacagaaacaagagccgccagatggaatccctgggcatgaagctccaacttaaaaagaaagtgaacgcctgcagcacctacacaccccacatctgcagacacacctgtcgcgtgaacgccgtcgaggaactgcactctagaaggatgtccgtgcggatcgtgaaaaattgggtgtcctgctgctacgtgcggctgtcagctgtgggactgtctacttggagcgctctggacaacaagatcatctgcaagggccacagaatcaccggctacccctacgatgtccctgactatgcgtcctaaaggcgcgcctagcggccgc

SEQ ID NO: 1143 - DNA, 4690 bp, Artificial Sequence
  Cloning cassette hTPA 1B
gaattcggatcccgcgacttcgccgccatggatgcaatgaagagagggctctgctgtgtgctgctgctgtgtggagcagtcttcgtttcgcccagccaggaaatccatgcccgaaccgagatccaattgaccatgaacgacagcaagcacaagctggaaagccccgctctgaaacaggtgtcaccagcctctccacctactcagcagcctcagacacctcaggatagcagacaggtgctggccatgcctagcagctggtctagctctggcagaacccagcggaaggtggtcaagaatcctagccagcctgtgcctctgagaaacgacggcatcaccaacggcaacgactccaccagaagctgcagcatcagcctgaagaaaagcctggaaaagatgcccctcatgatgaagaagaaggacagcaccatcttcatcgtgcccatgagcctggcctgtagcatcaccgtgtctttcgtgggccagatcagcacactggtgctggatgtgtccagcatctcccactggaacaaagtgcggcagaacttcaagcggaacgccgacaagaagaacgttcggagcggcgagaagaacgacctgcagctgtttgtgatgagcgacaccacctacaagatctactggaccgtgatcctgctgaacccctgcggcaatctgcacctgaaaaccaccagcctgggcgactgtcctagaacaatggccggaccttctgcctctctgcaccctgcatctggcagagcctctagaaagacctggcagagaaggctgagagcctgtagagctggtggacctgctggatgggccagacaggccttcgataagaaaggctttgtgatcctgagcgtcggagccggaacaggcggaggacctgcttgtgttcctgtggctgaagcttctacaggcgcttggacagctgaaggcgccgctggaacaagatgtagagcttctagagccccttgcagacagctgcctgccagctctcctaccaagtgcgagatctgcgtgaagcgcagacggcggagaaagagaagcagccagtctagaagccccgtgcctaagaaacgcgagagaatgatgctgcccgtgcgggccagaacagctagatctgcacttcctcaggggagagcccctcttgagggaatgctgcttcctagagcactgcccagcctgctgtctagaatgccagccagaagagagagccggttttggctggctctgcaggcacttggactcagacctccacatctgcctagctgtcatcctctgcctcaactgcttggccctccacctcctcatcaggcccctacagctttcttcctgctggacatcattctgcggctgccctgcaaagtgaccgagtctagcaatatgggcggcaacagatccatctgcctgaccaacgccaagaaaatggaagatatgatctgggagagcacgcccctgagcatcagcagacctacatctagagccaggcagagctgttgtctgcccggactgacacatcctgctcaccagccactgggatctatgaccctggccatcagattcatcagcgctcctcagcctagctccagcacagtgacagctgctcctagcggccagtacttcaagggcaagaagcggcggaaagagatcttcaagaagaagaaacccctgacattcagccccagcctggccaaaaagaccctgaccaatagcagcttcttctacaccagcgaccgcgaggccaagaaatctatgaagcggagcatgaccctgaaggccctggtcaagacctggacacagttcagaaactaccccagagcctcctctcctggacaccctctgggacctaatggcatctgggaagtgatgcccagaacactggaaggctgcatctccgtgaaggaccacagaacaagccagaaccacagcaagtgcatcaccgagtgtgtgcggacagccctgaacagaagaagcaagatcgaggcctctcctatcggctctatcgccctgagatccatgcctaagagcagaaaccaggtgctgttcagacggaatctgaccccaagccagctgagaactctggcccctccttatatgctgctgccccagtctctgagccagagcctgagcagaaagcagatccctagccagtccatgctggtggcctctagagcaggacagtttcctgtgtggcggagaaccagcagaggaatgagcctgcagtggaagtccggcaatgcctgcacacctctgagatgccctagcagaagccctgccacattcctgacagctctgaacggctggcacagatctggactgagagcccagagaaagcgcaagcgcgagaagagaagccagaagtccaggcagaaccatctgcagctgaagtcctgccggcgcaagatctccaactggtccaagctgagaagcccctggatcttcgtgtccaagaagagactgcccaagctgaccaagtgtgaaatctgtgtcaagaacaccgccatcctggctatcaccctgatcacccctcaggaccctcatctggaccctgtgtgtcaccctcatagaaggcctggatggaagggccaccacagagtggtgttttctcatcaccctagcggcagcaccaagagccactggcagcaaagagaacgcggaggcggcagacgggaaaagaagggctgtagagagagatccctgctgtactccagaatgtgcctggtgcagatccccacacacacctgggagcccgattacttcgtgtctctgcccatgatgttcagctgggccacacagtcattccccgtgggagccgtgtttctgaccagacctgccattccttgctgtagctgcacaagccacagcaacccttggagtcagagcagacacccacacagaagcccacctacctcttgtcctccgctgctggaagcctttccactgcctagagcatccctgagagccaccgtgccaagacatagctctgtgctggcaaccggactgcatctgcacagacagatttctctgcccctgagaggattcctgctgcatcaaccactgccaggccagcatctgtggctgtctcatagactgcggctgagactgccaagaactcagcggcctcctagatccatcctgagccttagactgccactgaggccacagagaggacccagacctctgcatagatggctgcagcagaccacaggctgtagccagagaagataccccagactgaaaaccttcggcgtgccactgggctccattctgtgtctggctggatctctgagcaccatgatgatcattagcaccaccagacaagagtgtggcaggcgggcatctgtgccctgtagacctatgatcggaagcgccagaccaggaccttggagaacatctgctatgcctagcgccatgggcgtcgcactgcctacaagctgtgaatccggaagatctcctcctgccaccggcggaagaatgcctggaagccagagcattatgatgagctggatgcctcctctggctccttgtgccgcttgtccttgttctcccgctcctacactgtgtcccgctcatcctgctagagcacctacagccgtgcctgcctttacacctctgtctgcacatcctgtgcctgtgctgtctggatgtcacctggccgtcagaacctccatgctgacactgctgcctatgctgaagctggccccactgcaagtgaccaccacactgaagctgatcctggtcatgctggaaatcgtgaccgagagcactcggagagagatgccttctcaggccacaccttctccacctggaccttggcgagccgctctgggcaaagaagtgaagagatcccagagcaagctgcgcctgagaaacacaagccccatcgtgttctttctggccccatacttccccagacggatgaccagacggaccatgacaaccaccaaaatgatgatgatgcggcggaccaagcggagaaggcgcaaaaggcggagaatgacaatgatgacaaggcggaccctgctgacaaagaaaacctgtctgacccctagaaccagcgccgctaccaaagctctgccaaggcagacaatctcccagcggaggcctattcagacccctcctggaacatctctggccatctggggcaaccagcagctgaaatggacccctcacatcctgaagtccgccagcagaagggccagacctaccagctgtagcacctgtagaatgtggtggatcgccaaaaagcggatcaagctgcggcggaacagaaccagactgacactgacaggcacaagaagcagcggcaccagagcttctccatccgccgtttgcctgtgttgctggacctgtccttccagaagcttcccagccgcttctccaagcggattgagagcacctgttggagcacaggcccctccagaagttacactgagagctagctgtgcctccagcgcctctaaggcttgtgctggactttggccttggggagcacaagttcggcaaccatctttgcctggaccatgcgcttctctgctgagcacactgtctcagccacctccacaggctccatctcaagtgtggacagccgcaacactgagatgtcctgctgttccagctgctgcctgtcctcctggctacccctacgatgtccctgactatgcgtcctaaaggcgcgcctagcggccgc

SEQ ID NO: 1144 - DNA, 4672 bp, Artificial Sequence
  Cloning cassette hTPA 2B
gaattcggatcccgcgacttcgccgccatggatgcaatgaagagagggctctgctgtgtgctgctgctgtgtggagcagtcttcgtttcgcccagccaggaaatccatgcccgaagaaagatgcagagcctgaatcaccccagcagactgaccaacatgagcagaacacctccaagacgcgtgtgcaaccctcggagaaagacctggaagatgcggaagaagtacgcccagaagcctagccagaagaaccacctgtacaacagccggaagaaactgctcgaggacatgaagcagaatggcttcacaggccacagagagggcagcgagtctgataatctgggcctgctgtactcctttcctcctatccggatgtgcgccctgtctcaccctagcttctacatcagcagcaccgtgtgctttctgagcaagcactgcatgaccgcctgcacacaaaagaaaggccacatgatcttcagccgcgagaagatcatcaaccccaccatcagctgcccctttcagagccccacaaagcggctggaactgagcctggaaccttggattccctacctgcaccagcagaaaacccaaggcggcaagaagagaagcaagttccctggcaccagcctgcagtgctacctgaacagatgcagcctgatggaacagatccctcacctgaagtccgcctctccacagatcatgcagagaaccagcgccgaccggttccggatgaagcggagaatgcagaacctggacaatctgggcgttccatggccactgctgcctggacctctggaaaacacacagatccccagaacaagccctctgtggaagatcacaatggtgctgacataccccaactgcgtggtgcacgtgctgatgttctggctgcctatgagatctctgggcgagccttggagagctggctttcagtggggagagtccccttggcaagtgatggctagcctgacaggcccctatcctatcagcgagggcctgaccatgaccaccggcagaaacatcaacagcaactccctgatgaccaactgcctgttcagccccatcttcctgtgccaccacgccatcatgcaccggaagatgacaagcccacacttcagactgttcagcagcaagatcccacatcctcaggtgccatctgtggtggccctgtgcaagttcagagccacatttctgctcgccctgtgggagtgtagtctgcctcaagccagactgtgcctgatcgtgtctagaaccctgctgctggttcagtctgccgctcctccacatagactgctgggcccttctagatggtccagaagccacctggacttcagcccctactggatgaagaaagtgaagctggccaacggcctgtggttcaacctgatcttcgtgctgttcaaggccgaccagagcgagtctagcctgtctagcggccggaacaagaaaacaaagctgtggttctccctcatcaacatccaccaccgcaagaatcctctgctgcccatgagaatccccagcctgaatgcccagtggatgttcctgagaatcctgcttctggcccatatgtacggcttcagcacctacggcacccagaaaggcgagtgcgtttgtctgcagtgtctgagcggcagcagcctgttcattctgaagcagcccctggacctgaagatctccaagaccttcatgctgcaagctcacccacaggtgccagctcttgctcctcaagcttggtggcctgctagaagaggccctctgacatctgctccatccgctcagcagtctctgacagctagccctcagattatgcagcggatgagcgccgtgaacttcgagacaatcatctaccctccaagcacctgtagcctgccttgtagaggcagaacactggaaagcgccggactgtttccttggctgcacacccagtgtacacacccctgtaccatgctgctgccacaaggctggtggtgtacaagaggcggcggaaagcggaaaaagaaaatgtgcaaggtgtccggcggctgcaccgcctgtgttgagagatgtccttggaagggcatctgctggaagtggccagtgacagtggctgctcagtggtctagcgtgacctctctggaatggacagcccaagagagaggctgcagcagctggctgatgaagcaaacatggatgaagtcttggtccctgcgggaccccagctacagatccatcctggaatacgtgtccaccagagtgctgtggatgcccacaagcaccgtgcggagaagaaacagcagaaagcagtctcaggtgcagctggccattcaggtgctgctcgtggacaagcacaagtactttctgttcggcagagcccgcaaccggaacatgaagaaaaccatgagccacctgatcgcccatcaggccctgaagatgagcggcctgaggctgtttcatcctcggctgctgacaagaaagaagcccggcaagttcctgcctagcagatttccttggggccctcctcctctgtgtcatcctgcttggctgagccctatctccgcctgtccaagactgctgccatatccttttcacgtgctggccctggaagtgacctttccacctggaacagccatgcctcagatgcaactgcaggccctggccatgtgggagaaaggctgggataagcggaagagaatgaagaccggcgccatccaagagaagggcgctattcaagagaaaggggccatgaccaagcggatctgcgtggtcaatttcgaggcctgcagagagatggaaagcctgagcgcccctgagaagattaccctgtttgaagcccatatggcccggtgcacctccatcaatgtgctgtgtgtcagagcctctctgatcgagaagctgatgaaagaaaagcgcaagatgaagcgcaaccaggtggcatccccacaaattatgcagaggctgttcattaagggctaccagaacaaccacttcaccttccatctgcaaaacttcgccttcttcagcagcttcggcaacaacaagtacatcaatatcctgacgcggcgcaagaaaagagaggaccactgcggactgctgatcctgatccagcacggcggcatcttcacctttcggttctgggtcgaaaagctgagctggaacatctgcaagaacctgagcctgtacctggataagttcgtgcagcggctgctgtacgtgtacatcatcgagacaaacgtgttcgtgctgaacctgttccacgtgccagtgaaccagatcttcatgatggccttctacctgaagtacaccgagaaggcctgggtcatggaactggaatggctgatccaacagcagtgttaccagcaagagaagaaaagccggaaactgatgagcagctgccgggccttcatccacacacctagaagccctggctgcagcgtgtacgccaatatgtgctgggccttttggaagcctcctagccagggcatcagctcttgtctgatgacaggctgttggggcagccctcctctgcacctgtgtcagcctctgaggcggtataagaaaaggggcgtgatcgcctggcggcggagaaagtggcagatccggcatgtgctgaaaaacctgatcctgtttcatgtgcggaacatcgtgtacggcatccaagtgatgctgtgcggcaagggactgacacaccctgtgcctctgaaacggaccctgcagaacaagaggaacaagaacatcaagcgggtcaaccagaagaagggcaacatcaagaggaagtccatcctgctgcacctcattgtgctgaatagccccgagagcaaccccaagttcttcctgacctttagccagctcgagaagaaagctacctggatgagaagaacaggcgccctgagagccacagctcctgctacagcagctcctcaggctcagactcctcattggagagccgccacaacaagcagcatgagcagcagccctagagccgagcctacatcttctagctcttgggccacctgttggcccagatgctgtagctccagctgttactggtccctgagttcttggcctcctgctggcgccgctgaggctacaaacaccagaactagaagcagagagtcccagcggggcagaatgctgacttggagaagtagtctgtggctgcagggcaccagatgttttacaggcgtgcggacaagcagcggaagctgtggcagagcttgtagctgcggaagaggctgtggaacccctagaggcgattggaagagacaccctcctcggaggaatagcgtgatcgtgcacaagatcgtgctggtgtttctgaagtccctgtccagctacaactgcgagagaaggatcagcggcatccagaagagagccatcgagtttgccgtgctgaaactgctgaatatggacctgcactggaactccgcctacctgggcagaactctgctggtcacctgtatcctgtatcaccggtggatcgtgacctccatgtgccagtctcagagatggctgaccagcaccacaagcagatccagcgctctgatgtggacccggcagatcaatcggaggaagctgcagagaaagaagaggcacccaagctggccttggaccagatgccttagaatgaggcctcctagaagcggctacccctacgatgtccctgactatgcgtcctaaaggcgcgcctagcggccgc

SEQ ID NO: 1145 - DNA, 4687 bp, Artificial Sequence
  Cloning cassette hTPA 3B
gaattcggatcccgcgacttcgccgccatggatgcaatgaagagagggctctgctgtgtgctgctgctgtgtggagcagtcttcgtttcgcccagccaggaaatccatgcccgaggagctgctgctgcctcttgtcagtctcctccttctcctcgggaaaccacacctagctccgacgccaccagacggacaagaccaattgccgctcagagcaagaaaaccatgacagccgccggactgacccctaagaacaagaagcggagaaagctgcggcccaagatgatccggaagatccagaagagaaggcggaccgccaaccggcggaatagcagaagggctacccctacaagcaagggcagcctgagaagaaagtacctgagagtgcggggacctcctctgcacacccggaacatcagaaagctgatctggaccaagcagcggagcttcctgtctctgttccccaagctgagagccaccgagcagatgaccaatgtgggctgctctatccctcacgtgcccaaagccacagccgctcactctgtgacagtgaaactgcagctgcccctgaccttcagcaccctgctgtgggatagcagacacaccatgagcctgagcaacatcctgatgaagttccggctgcagtctagcccattcctggccagatcctggaacaccatgcagtggaacaacaagaaaatggccatgaccgtgatcgctggcgcccaccactgtcagtacaagctgacctacaccaaagtgtggaagatgaactggaagaaaatgatgatcggcagccagcatctgctgttcagccctctggatagcagtcccctgcagctcctgctgcaccctcacggcaagagatgcaacccttgctgcagactgacctggatgagccagaacaccagaagcaccaacctggaaaagaaccccagcctgaagaagcagagccagcggagaggaaagctgagcgcctttagcggcagaatcctgcaccagccagaaatggccgccatgagactgatgcccaagttcctgaactccaccaacagctggtggaccctgaccacactgagcttcgtgctgatcgaggaagccagacagcccagcagacctaccggcagaacacctaccaccagactgatggcccctgtgggcagcgtgatgagctgttctctgctgacccagccttctccagccagcgcctgtacaatgcctccactgctgcatccacagtgggcccctcatagtgctggactttctccaggcgcttgcagacctgcctgcacctgtatcagcatgaccaccatcagcagggccacatggggcccagtgtactacgtgtgcaaccggatgaacgtgtccagcgtgctgaagcccttcctgttcaccgtgcctatcgaggacatgagagagtgcaccctgggcagaaacagaatgaatgtgtcctctgtgctgaaaccctgtctgatccctgtgccaatcagcgagaagaagaggaagctgcccaacatcgagatcacccctcagcggtctaaggccatgctgcagaagcagtgctgctacaacctcgtgatcaagcaccctctgatcttcagaatcaacctgcggcggcagggcaagaccaaagatggcgttgtgcagagcctgggcttcctcaaccagcagatcatcctgcagaaagagttcttcatctgcctgctcatgttcatcaagcggtggaagcctgccgccaccaagagcagaaagaagggccacaccaagaacagacggaaggccaagagaaagccccagatctacctgttcttcctgaccgtgtgcggctttcacctgaaaaagaccagcgccaagtggctgaagaagtccaccaagtccagatccaacggcatggaagcttgcggcacacaccccactcctagactgagctgcctgagagttagatgcggcggctggctgtgtggctggacacctagaggtagaaagtccggcgtgatgaagtgctgggatctgtgccccgtgcacaagaagagaggcctgttcagactggattttcaccccagaagcagctccggcaagggaaagaacagcccctgctgccaaaagaaactgcgggtgcagaaccagggccatctgctgatgattctgctgcacaatgaccgggtgttcctcgtgaagatcggcgagaagctgaagcactgtttcaaggcctggggctccagacggaaccggcggtacagaaagatctacggcgagctgaagatgtccctgcaggccttcctgatccacctgagaaaggtggacacccaccacctccaggtggtcaccaaaacagtgaccgccacaacagccgacggccagagaatgcggagactgaagtgcaaggcctgccggctgagatgggccagacctgaacctgctgctcaggcccctcctaagagccactttccacctcatcctagcggccccagcagaacaagtagcctgcagctgagaagcctgttctttagccactgcctgtgcagccagaagaaggaccctgccggcaagctgaaaaagctgctgaagaaaagcagccagctgcggagaagctggcgcaatgtgtccagaatcagcacccctcctccactgatcctgtggcctcaagctgctcctgtgtccgtgatcaccatgaagctgtgggagaagcacttcaagggcctgaattggaacctggtcgtgtggattctgaacctgaagatgatgacctacatggaaatgcactacggccatcaggccccacaggtggcaatgctgcctaagctgctgtgcagacagatgctgcccactctgagcacactgcagcagagacatcctcagggcccttgtcctcctcctgtgacacctctgagagtccagtctgtcctgctgctgggagtgcctcagacagccagaggacctagaagaaaggtcctgatggtgctgtggctgcccgccaatcagtctctgcagaaaagccaggttttccagtgggtgctgcggacagaggtggcccctagatgtcctagatctgccgtggacatcagccccggacctacatctcctagcctggcctcttgtgcctctgtggccattggaaagctggcactgcttggcgcctctgctccttgtggtgctgctggcgctagagaggccggaagatttgctgtgctgggcaccatggtcatgaagctttgtttcttctacctgctgtaccggctgcgcatcccaagcctgaggaagtacagacagcacctgaaccggaagctgcacctgacaagatcctgcctgatcgatctgaccatgatgatgtcccagaagctctggaagaaccagcggaagagaatccctctgccatctccacggcaacatctgctgccacagtaccctctgcacccacctccaccttgtctgctgttgctgcaccatagacaccacctggcctttctcgagatggcctgtagctctcagcacacccacagcatcaagatctggatcagcttcagccatgaagtggaccctccaggcagcgtgtggatactgccttgcgatctgcctcggatgctgccaatctcttcacccctgcacagaccccagatgcctttctggacctgcacctttcctgccacaacctggggcacatgggagacaccttctacatggggctggcggactttcagaggcgctagcagcagcacatcccgggacagcagatccttcttcacctctgctcaccctagcaggccctgcagaatgagactgtaccagtgcaagaagaagctcctcctgaaactgctgaccaccaccacaagcagccccagaagatcccctgctctgagagcaagaggcggcaccacaatcggcgaagtgaccagctgtaccaacctgagcgtgcccatgatgctgaccatcctgatttggaagcgggtgttcatcctcctgctgagcgataagaagggcgccaagaagatcaccttcctgcctattcctccacacctgagacaccctctgctgctgttcgagaagaaacggcctgagtggctgagcatggacctggacggaatgctgacagtgatcggccagggactcgtgggcatgacccctagagatctgggaacagtggcaggcgccaccgctcagattcagcgacctatccaggtgcagactggcggcagactcagaagaaacctgcagagaaacctgaaggtgctccaggtgtccgtgtacagcggcaacctgctgtcctttagcagacggggcatgaagtctagcgtgcggctgaaaaaccgcgagtgggagaaacggaagcagattctcggaggcggcggaaagtacaaagagtacttcctgaagcgcatcctcatccggaaggctatgacagtgctggccggcgacaagaaaggactgggcagattcatgagatgcgtgcagagcgagacaaaggccgtgtctctgcaactgcctctgggaagaaacatggaacaccggttgaccatggacagcgccctgagcctgacaaagagagagggacccgagacactcaaaaagaaatacctggtccagcaccagatgaagtgtctgaccgccgtggattgtctgcaggctttttgggacatgggctacccctacgatgtccctgactatgcgtcctaaaggcgcgcctagcggccgc

SEQ ID NO: 1146 - DNA, 4690 bp, Artificial Sequence
  Cloning cassette hTPA 4B
gaattcggatcccgcgacttcgccgccatggatgcaatgaagagagggctctgctgtgtgctgctgctgtgtggagcagtcttcgtttcgcccagccaggaaatccatgcccgaatccagaagaagaagcagaagtccaacctggacctgcagcaccagcgcagacgcaaaaagaagaaggacaaggtcgagatccggaatcggagccccaaggccaatagcacagagtgtcagggcgagcacagcagagagcagaacctgctgaatctggtgcagctgaaccctcacagccctcaccacagaaaggacgaagaggaccaccagaagcggcaccaccaccacaatcaaaagaaaatgagcgtgatggccaagaagtcccagcagcctctcggacaggcctttggctctctgtgtcagctggtgtccgccgatttcagcgcccctcaagtgaccagactgcggagcctgaaccatctgctgatcaacgagggcaacaaccactggcctagagtggaaatgcctaccggttggctgctcgtgggctacaacaccagaaacacagcccagaatcctcggctgcagcagcacctgaaacactggcagcagtgcaccagagccagatggtgccaagagccttgtcagaccctgaccttcttccatttcttcttctttttcaaaacggtgtccctgtgctgccccggctggtctaaaggacaacctcctccacctggcctgaagccttctagcctggcttctcaggtggccagaaccacaggcgtgtaccagcacgtgtggctgatctgcttcgtgttcttcgtgtgcgtggaaaccggcttctgtcacgtggcccaagtgggactcgagagactggtgtctctgagcggcatcaccgacgtgaaccattgggcccagcctaagccatctcctagcaaaggcaccggcatgaacagacccatcggcctgagagttggcaaaggcgtgtgggccagactgagagcctccgtgtctttctggaccctgctgcctacaacaggcgtgcggacaagaggaagccctctgagactgacactgtggcctccacggaacatcctgaacagcctgcctagcagcatggaaatcgccgtgctgcaagagaaccgcaagaccagaaaggccgccagagagaagcacagaaagaccgacaacctgcacctgtgctactaccacagccagagcaaccggaacaagagccggcagatggaaagcctgggcatgaagctgcagagccctctgtgggattgctccaccacaacaggcacacaccacggctgtctgtgggagatccctagcgttacactgctggcctgcagagtgaacgccgtggaagaactgcacagcaggcggatgtctgtgcggatcgtgaagaactgggtgtcctgctgttacgtgcgcctgtctgctgtgggcctgtctacttggagcgccctggacgtggtcatcaacctgaagcggctgcagaagttcagccagaagtctcagcaccactgcgccctgagaaagatcgagtgggccacaaagctgagcctcggcggaaaagctggaccccaggctcaagagaaggccaacgccaagaagatgcccttccagcggtggatcttcagcaatcagctgaccgtgcagatgctgtgcctgcctattgaagccctgactgccctgttcacctgtcggacagccagcatcagcgtgaacatcagcaccctgatgagcatcctggaagcccctctgttttttcacggcgacctgtgcgaggaaaagaagaacggccggatcagcagccaggctcctctcagactttggtcttggtgcggcacaagccagacctactttggcagcaccgccaagaaaagccccaccagcttttgctgcgagtggggaggacaggctcaccggcagagaaataccggaatggaaatcctgctgtggattctgctcaagatggaaattcagatcttcaagatttgcctgggcgagatgcagctgtgcacctacacaccccacatctgcagacacacctgtagaggcggacctagcgccagcgatagatgctgtagctgtagccctagcggcttcagcgccggaagaggcagatgtccagttcagggatgtctgcggcctcacagagtgcagctgctgagaagatggggccctggatctcctgctggccagagactgtctaagggctttcagctgctccgttggtggggaccaggatctccagctcctgagcctagaaagggcccatttccaccacctgatcctccatggcctgtgaccgctgtgacagtgatggctggctctgtgcctagcgctcagtctgtggatgctctggaaagccctggacctctggcactggaaggacctagcagccccagaaacctgctctggcgggaaatgagcatcttcctgcctggcatcttcacctctcggattctgaacctgcaagtgctgaagaagatcctgcggagctttatgaagctgtaccactctctggtcatgtgcctgcggctgcggaccaagctggaaaaagctctgagcgctctgttcatctggccccagcacagctacaagcagaggcctcctctgcagcctgtgcaggtcgtgctcagactgggaaacctgcctccattcttcagaggcagcgaggtgccctttcctagaccttgccggaccaagatgctgaaccagaagtgtctggcccctttcatcacacacccattcgcctctcagcccctgggacaagagatgcccaacaacacccagatcagactgctgaagcccctgctgacccctgacaccagatggatcttctccaaccagctgcagacagtccagatgctctgtctgccacctctgaagcagggcgagagaatcatttggcccctcggcggctttcagatccccaacttcttttggagcctcggaatcggccacactggcgcctggtggcatactggaaggcggagaagagaatggggcggctccaccgtgtctagaagcccactgtggatcagctccatgatctacctgagaggcatggccttcgccagcgacagctccatcagaaccaccagagtgtcctggtgcagaagatgcggcgccaaatctgccgctgcctccagcctcaagaagaaaccccgggacatctgtcggatcagcgactctaagaagatgacccagaagcgcgagagcaccctgggcaatttctggatgaagctcctccagctgccagacaagaagaagaagtctaccgaaaagaccaagatcatcaagaagatgaagaaacggatcatggtccacatgtgcagctccctggctctgccaacaggcctgacatctctgatcctgccaagcagcgatctggccgtgctgatctctagctccaccagccactttctgatgcggagcccagtgctgcctagctccagactgacttgtgcctctccacagctgcccagaatgtggacctggtccagctggctgaagtggctgaaaaactggaagcggttcaagcttaaaaagaagtacatcctggccatgacgctgaccctgaacgggcatccaagaaccgcctctatcaccctgcctaccaccagcctgaagggctctagaaccagctgttgccccagatctcaccccagactgcctaggacaaagtggcctctgcagtgcctgctgcacagcctgggaacaactggaacactcgtgtgggaaaggggcgtgctgcagatgagaagtctggaagctcactgccctctgcagaccttccacctccaccactgtagaactcagcccagctcttgccctcctgcatggattctgtaccaaggacagtggagcggagccgtcgtgggacttagacctgtggctcaccatctgccaagacctattcagggcctgcactgcccacaggctccacatcaaccagctctgtcttggggcaagtggcccgtgggaatgacaggacctgccagatgttgccggtggcctagacgggaactcaaaaagaatctgctgctcccctgccggtgcagacgcgagtatagagtgacaatgggccaagccttcggcagctttagcgccgactttagcgctccccaggtgttgaagaagaatcggaagcagaacaagattatctgcaagggccaccgcatcacaagcctgatcctgagctttcagcgcgtgaaacttaagaagaaagtcaacgcctgctctcccgcctgcacctctaaagcctggactcccagaaagctcgtggggagagccgtcagaagaaagggcatcatctgtatcaagaatatgttcctgcagcggaagggtttcctgaacctgagccacgtggaaaagttcgtgcctccttctcctcctctggctctcggccctagaatgcagctctgtacccagctggcccggttcttccctatcacacctcctgtgtggcacatcctgggacctcagaggcacaccccttgtcaaaagaaggtgccctccgctagcccatggggccttagaccatctccttgcctgagctggtcctccagaattgtggcccctggacacgccctgagctgtcggactagaagaagatggtccagcaagggctacccctacgatgtccctgactatgcgtcctaaaggcgcgcctagcggccgc

SEQ ID NO: 1147 - DNA, 5299 bp, Artificial Sequence
  Cloning cassette hINV 1A
gaattcggatcccgcgacttcgccgccatgcatcgacggcgctcacggagttgccgggaagaccaaaagcctgtgatggacgatcagcgggaccttatttctaacaatgaacaacttccgatgcttggtaggcggcctggagcaccagagtccaagtgttctaggggcgccctgtacactggtttctccatcctcgtgacactgttgctggcgggacaggcaacaactgcgtatttcttgtatcagcagcaaggaagactggataagcttacagttacatcccagaatctccaacttgaaaacctcagaatgaagcttccgaagcccccaaagcccgtctccaaaatgaggatggcgacaccgctccttatgcaagcccttcccatgggggctctgccccaagggccaatgcagaacgctacaaagtatggaaatatgacagaggatcatgtcatgcatttgcttcaaaacgctgatccccttaaagtttaccctcctctgaaggggagctttccagaaaatcttcgacatctcaagaacacgatggaaacgattgactggaaggtgtttgagagctggatgcaccattggctcctgttcgagatgtcccggcattctctggagcaaaagccgacggacgcacctcccaaggaaagcctggaattggaggacccgagtagtgggctgggcgtcacaaagcaagacctgggacccgtgccgatgaccgagatccagctgaccatgaacgacagcaagcacaagctggaaagccccgctctgaaacaggtgtcaccagcctctccacctactcagcagcctcagacacctcaggattctagacaggtgctggccctggccaagaaaaccctgacaaatgcctccagagccggacagtttcctgtgtggcggagaacaagcagaggcatgagcctgcagtggaagtccggcaatgcctgcacacctctgagatgccctagcagaagccctgccacattcctgacagccctgaatggctggcacagatctggcctgagagcccagatgcctagctcttggtctagcagcggcagaacactgaagctggcccctctgcaagtgaccaccactctgaagctgatcctggtcatgctggaaatcgtgaccgagcgctccctgctgtactccagaatgtgtctggtgcagatccccacacacacctgggagcccgattacttcgtgtccctgcctatgatgttcagctgggccacacagtcttttcccgtgggcgccgtgtttctgaccagacctgccattccttgctgcagctgtaccagccacagcaacccttggagccagagcaatcagcagctgaagtggacccctcacatcctgaagtccgccagcttcgacaagaaaggcttcgtgatcctgagccggcggagcaagattgaggcctctcctatcggctctatcgccagctctcctggacatcctctgggacctacactggccatcagattcatcagcgcccctcagcctagcagctctacagtgacagctgcccctagcggccagtactttatcgccaagaagcggatcaagctgcggcggaacaatatgggcggcaacagatccatctgcctgaccagaaagcgcaagagagagaagcggagccagaagtccaggcagaaccatctgcagctgaaaagctgcagacggaagatcagcaactggtccaagctgagaagcccctggatcttcaccaagtgcgagatctgcgtgaagaacaccgccatcctggctatcaccctgatcacccctcaggaccctcatctggaccctgtgtgtcaccctcatagaaggcctggatggaagggccaccatagagtggtgttctctcaccatcctagcggcagcacaaagagccactggcagcaaagagaacgcggaggcggcagacgcgagaagaagggatgtagagaacagcggaaggtggtcaagaacccctctcagcccgtgcctctgagaaacgatggcatcaccaacggcaacgactccaccagaagctgctccatcagcctgaagaaaagcctggaaaagatgcccctgatgcggagagccagacctaccagctgtagcacctgtagaatgtggtggaagggcaagaaacggcggaaagaaatcgtgcctatgagcctggcctgcagcatcaccgtgtcttttgtgggacagatcagcaccctggtgctggatgtgtctagcatcagccattggcggctgccctgtaaagtgaccgagagcagctccagcttcttctacaccagcgacaggacccctctgagcatcagcagaccaaccagcagagctagacagagctgttgtctgcccggactgacacaccctgctcaccaacctctgggcagcatgagcactagaagagagatgccaagccaggccacaccttctccacctggaccttggagagccgctctgggcaaagaagtgaagagatcccagagcaagctgcgcctgagaaacacaagccctggggagaagaacgatctccagctgttcgtgatgagcgacaccacctacaagatctactggacagtgatcctgctgaacccctgcggcaacctgcacctgaaaacaacatcactgcagcggccacctcggagcatcctgtctctgaatggaatctgggaagtgatgccccggacactggaaggctgcatcagcgtgaaggatcacagaaccagccagaaccacagcaagtgcatcaccgaatgtgtgcggactgccctgaacgtgtccaagaagagactgcctaagctgatgaagaagaaggacagcaccatcttcatcaacaaagtgcgccagaacttcaagcgcaacttcaagaagaagaaacccctcactttcagccccagcagacggatgactcggagaaccatgacaaccaccaaaatgatgatgatgcggcggaccaagcggagaaggcgcaaaaggcggagaatgaccatgatgaccagacggaccctgctgacaaagaaaacctgtctgacccctagaaccagcgccgccacaaaagctctgcctagacagaccatcagccagcggaggcctattcagaccccacctggaacatctctggccatctggggcagaacaagactgaccctgacaggcaccagatccagcggaacaagagcctctccttccgccgtgtgcctgtgttgttggacctgtccaagcagaagcttcccagccgcttctcctagtggactgagagcacctgttggagcccaggctcctcctgaagtgacactgagagcctcttgtgcctctagcgcctctaaagcctgtgctggactttggccttggggagcccaagttcgagttggagctggaacaggcggaggacctgcttgtgttcctgtggctgaagcttctacaggcgcatggacagctgaaggcgccgctggaacaagatgtagagcctctagagccccttgccgccaacttcctgctagctcccctaccaagtgtgaaatttgtgtgaagcgcagacggcggagaaagagaagcagccagtctagaagccccgtgcctaaaaagcgcgagaggatgatgctgcctgtgcgggccagaacagctagatctgcacttcctcagggcagagcacctctggaagggatgctgcttcctagagcactgcctagcctgctgagcagaatgcctgccagaagagagtcccggttttggctggctctgcaggcacttggactcagacctccacatctgcctagctgtcatcctctgcctcaactgttgggccctccacctcctcatcaggccccaatgacactgaaggccctggttaagacctggacacagttccgcaactaccccagagccgacaagaagaatgtccggtctaccgccttcttcctgctggacatcatcctgggcgattgcccaagaacaatggccggaccttctgcctctctgcatcctgcatctggcagagcctccagaaagacctggcagagaaggctgagagcttgtagagcaggcggacctgctggatgggctagacaggcctatcctagactgaaaaccttcggcgtgcccctgggctctattctgtgtctggccggcagcctgtccacaatgatgatcattagcaccaccagacaagagtgcggcaggcgggcttctgtgccttgtagacctatgatcggaagcgccagaccaggaccttggcggacatctgctatgcctagtgccatgggagtcgccctgcctacctcttgtgaaagcggaagatctcctcctgccaccggcggaagaatgccaggatctcagtctatcatgatgagctggatgcctccactggctccatgtgccgcttgtccatgttctcccgctcctacactgtgcccagcacatcctgctagagcaccaacagccgtgcctgcctttacacctctgtctgctcatcctgtgccagtgctgtctggatgtcacctggccgtcagaacctccatgctgacactgctgcccatggaagccaaaaagagcatgaagcggtccaacgctaagaaaatggaagatatgatctgggagagccggctgccactgaggccacaaagaggacctagacctctgcacagatggctgcagcagacaaccggctgtagccagaggcggatcgtgttctttctggccccatacttccctcggcaccctcacagatctccaccaacatcttgcccacctctgctggaagctttcccactgccaagagcttctctgagggccacagtgccaagacatagctctgttctcgccaccggtctgcacctccacagacagatttctctgcccctgagaggattcctcctgcaccaaccactgccaggacagcatctgtggctgtctcacagactgaggctgagactgcccaggacacagccatctttgcctggaccatgtgcaagcctgctgtccacactgtctcagccaccacctcaggctccatctcaagtgtggactgccgctacactgagatgtcctgctgttcctgcagctgcctgtcctcctgctctgagatccatgcctaagagccggaaccaggtgctgttcagacggaatctgaccccaagccagctgagaacactggccccaccttatatgctgctgccccagtctctgtcccagagcctgagtagaaagcagatccctagccagtccatgctcgtgggctacccctacgatgtccctgactatgcgtcctaaaggcgcgcctagcggccgc

SEQ ID NO: 1148 - DNA, 5281 bp, Artificial Sequence
  Cloning cassette hINV 2A
gaattcggatcccgcgacttcgccgccatgcatcgacggcgctcacggagttgccgggaagaccaaaagcctgtgatggacgatcagcgggaccttatttctaacaatgaacaacttccgatgcttggtaggcggcctggagcaccagagtccaagtgttctaggggcgccctgtacactggtttctccatcctcgtgacactgttgctggcgggacaggcaacaactgcgtatttcttgtatcagcagcaaggaagactggataagcttacagttacatcccagaatctccaacttgaaaacctcagaatgaagcttccgaagcccccaaagcccgtctccaaaatgaggatggcgacaccgctccttatgcaagcccttcccatgggggctctgccccaagggccaatgcagaacgctacaaagtatggaaatatgacagaggatcatgtcatgcatttgcttcaaaacgctgatccccttaaagtttaccctcctctgaaggggagctttccagaaaatcttcgacatctcaagaacacgatggaaacgattgactggaaggtgtttgagagctggatgcaccattggctcctgttcgagatgtcccggcattctctggagcaaaagccgacggacgcacctcccaaggaaagcctggaattggaggacccgagtagtgggctgggcgtcacaaagcaagacctgggacccgtgccgatgagaaagatgcagagcctgaatcaccccagcagactgaccaatggctctcctccactgcacctgtgccagcctctgagaatgagcagaacccctcctagaagagtgtgcgccgctcctccacatagactgctgggcccttccagatggaaccctcggagaaagacctggaagatgcggaagaagtacgcccagaagcctagccagaagaaccacctgtacggcggcaagaagcgctctaagttcagcagaagccacctggacttcagcccctactggatgaagaaagtgaaggtgctgttcaaggccgaccagagcgagtctagcctgagcagcggaagatgcagcctgatggaacagatccctcacctgaagtctcggcggaagtggcagatcagacacgtgctgaagaacctgtggctgcccatgagaagcctgggagaaccttggagagccggctttcagtggggagagtctccttggcaagtgatggcctctctgaccggcagagccacatttctgctggccctttgggaatgtagcctgcctcaggcaagactgtgcctgatcgtgtctagaaccctgctgctggtgcagagccggaacaagaaaacaaagctgtggttcagcctgatcaacatccaccaccggaagaacccactgctgcctatgagatggtggtgtaccagaggcggcggaaagcggaaaaagaaaatgtgcaaggtgtccggcggctgcaccgcctgtgttgagagatgtccttggaagggcatctgctggaagtggcctgtgacagtggccgccattagaatgtgtgccctgtctcaccctagcttctacatcagcagcaccgtgtgctttctgagcaagcactgcatgaccgcctgcaccagaaagagaatgaagaccggcgccatccaagagaagggcgctattcaagagaaaggggccatgaccaagcggatctgcgtggtcaatttcgaggcctgcagagagatggaaagcctgagcgcccctgagaagatcaccctgtttgaagcccacatggcccggtgcacctccatcaatgtgctgtgtgtgcgggccagcctgattgagaagctgatgaaagaaaagcgcaagatgaagcggaaccaggtggcctctccacagatcatgcagcggctgttcatcaagggctaccagaacaaccacttcaccttccatctgcaaaacttcgccttcttcagctccttcggcaacaacaagtacatcaatatcctgaccatcctgttccacgtgcggaacatcgtgtacggcatccaagtgatgctgtgcgctagccctcagattatgcagagaaccagcgccgaccggttccggatgaagagaagaatgcagaatctggacaacctgggcgtgccatggcctctgttgcctggaatcccatctctgaacgcccagtggatgttcctgagaatcgcatccccgcaaatcatgcagaggatgagcgccgtgaacttcgagacaatccgggccagaaaccggaacatgaagaaaaccatgagccacctgatcgcccatcaggccctgaagatgagcggcctgagactgtttcaccccagactgctgacacggaagaagcccggaaaactgctgctcgcccatatgtacggcttcagcacctacggcacccagaaaggcgagtgcgtttgtctgcagtgtctgagcggcagcagcctgttcattctgaagcagcccctggacctgaagatcagcaagaccttcatgggccacagagagggcagcgagtctgataatctgggcctgctgtatagcttccctccaccttatcctatcagcgagggcctgaccatgaccaccggcagaaacatcaacagcaactccctgatgaccaactgcctgttcagccccatcttcctgtgccaccacgccatcatgcacagaaagatgacaagccctcacttcaggctgttcagcagcaagatcccacatcctcaggtgccatctgtggtggccctgtgcaagttccgggccttcatccacacacctagaagccctggctgcagcgtgtacgccaatatgtgctggcccaagttcttcctgaccttcagccagcagtggtccagcgtgacatctctggaatggacagcccaagagagaggctgcagcagctggctgatgaagcagacatggatgaagtcttggagcctgcgggaccccagctacagatccatcctggaatacgtgtccaccagagtgctgtggatgcctacctctaccgtgctgcaggctcatccacaagttccagctctggctcctcaagcctggtggcctgctagaagaggacctctgacatctgccccatccgctcagcagtccctgaccagagagaagattatcaaccccaccatcagctgcccctttcagagccccaccaagagactgatctaccctcctagcacctgttctctgccctgcagaggcttcctgcctagcagatttccttggggcccacctcctctgaacagcgtgatcgtgcacaagatcgtgctggtgttcctgaagtccctgtccagctacaactgcgagcggagaatcagcggcatccagaagagagccatcgagttcgccgtgctgaaactgctgaatatggacctgcctctcgagaacacacagatccccagaacaagcccactgtggaagatcacaatggtgctgacataccccaactgcgtggtgcatgtgctgatgtttggcgccctgagagccacagctcctgctacagctgcacctcaggctcagacccctcattggagagctgccacaacaagcagcatgagcagcagccctagagccgagcctacatcttctagctcttgggccacctgttggcccagatgctgctccagctcttgttactggtcactgtctagctggcctccagctggcgccgctgaagctacaaataccagaaccagaagccgcgagagccagaggggtagaatgctgacttggagaagctccctgtggttgcagggcaccagatgttttacaggcgtgcggaccagctccagatacaagaaaagaggcgtgatcgcctggcggagacagatcaatagacggaagctgcagagaaagaagcactggaacagcgcctacctgggcagaacactgctggtcacctgtatcctgtatcaccggtggatcgtgacctccatgtgtcagtcccagagatggctgaccagcaccacaagtagatctagcgccctgatgtggaccgagctgagcctggaaccatggattccctacctgcatcagcagaaaacccagcggacactggaatccgccggactgtttccttggctgcacacccagtgccaagagaagaaaagcagaaagctgatgtccagctgcacacacccctgcacaatgctgctgccacagggatgtcatcctgcctggctgagccctatctctgcctgtccaagactgctgccatatccttttcacgtgctggctctggaagtgacctttcctcctggaaccgccatgcctcagatgcagttgcaggctctggctatgtgggagaaaggctgggataagcctggcaccagcctgcagtgctacctgaacagaagaagaaacagccggaagcagagccaggtgcaactggccattcaggtgctgctcgtggacaagcacaagtactttctgttcggccaaaagaaaggccacatgatctttagcctggccaacggcctgtggtttaacctgattttcaactcccggaagaaactgctcgaggacatgaagcaaaatggcttcaccggcaaaggcctgacacaccccgtgcctctgaagcggactctgcagaacaaaagaaacaagaatatcaaacgcgtcaaccagaagaagggcaacatcaagcggaagtccatcctgctgcacctgattgtgctgaatagccccgagagcaacctgatcctgatccagcatggcggcatcttcacctttcggttctgggtcgagaagctgtcctggaacatctgcaagaacctgagcctgtacctggacaagttcgtgcagagactgctgtacgtgtacatcatcgagacaaacgtgttcgtgctgaacctgtttcatgtgcccgtgaaccagatcttcatgatggccttctacctgaagtacaccgagaaggcctgggtcatggaactggaatggctgatccaacagcagtgctatcagggcagctgcggcagagcttgttcttgtggaagaggctgtggcacccctagaggcgattggaagagacatcctcctcggagagccttctggaagcctcctagccagggcatctctagctgtctgatgaccggctgttggctcgagaagaaagctacctggatgcggcggacccgccggaagaagagggaagatcattgcggactgagacaccccagctggccttggacaagatgtctgaggatgaggcctccaagaagcggctacccctacgatgtccctgactatgcgtcctaaaggcgcgcctagcggccgc

SEQ ID NO: 1149 - DNA, 5296 bp, Artificial Sequence
  Cloning cassette hINV 3A
gaattcggatcccgcgacttcgccgccatgcatcgacggcgctcacggagttgccgggaagaccaaaagcctgtgatggacgatcagcgggaccttatttctaacaatgaacaacttccgatgcttggtaggcggcctggagcaccagagtccaagtgttctaggggcgccctgtacactggtttctccatcctcgtgacactgttgctggcgggacaggcaacaactgcgtatttcttgtatcagcagcaaggaagactggataagcttacagttacatcccagaatctccaacttgaaaacctcagaatgaagcttccgaagcccccaaagcccgtctccaaaatgaggatggcgacaccgctccttatgcaagcccttcccatgggggctctgccccaagggccaatgcagaacgctacaaagtatggaaatatgacagaggatcatgtcatgcatttgcttcaaaacgctgatccccttaaagtttaccctcctctgaaggggagctttccagaaaatcttcgacatctcaagaacacgatggaaacgattgactggaaggtgtttgagagctggatgcaccattggctcctgttcgagatgtcccggcattctctggagcaaaagccgacggacgcacctcccaaggaaagcctggaattggaggacccgagtagtgggctgggcgtcacaaagcaagacctgggacccgtgccgatgggagctgctgctgcctcttgtcagtctcctccttctcctcgggaaaccacacctagctccgacgccaccagacggacaagacctattgccgctcagagcaagaaaaccatgacagccgccggactgacccctatgatccggaagatccagaagcggcggagaaccgccaaccggtgtctgagagttagatgtggcggctggctgtgtggctggacacctagaggacagaacaccagaagcaccaacctggaaaagaaccccagcctgaagaagcagagccagcggagaggaaagctgagcagcctgttcttcagccactgcctgtgccggaacagcagaagggccacacctacatctaagggcagcctgcggcggaagtacctgagagtgcctattcctccacacctgagacaccctctgctgctgatggacctggacggaatgctgaccgtgatcggacagggactcgtgggcatgacccctagagatctgggaacagtggctggcgccaccgctcagattcagaggcctattcaggtgcagaccggcggcagacttacacctcctcctctgattctgtggcctcaggccgctcctgttgatcctcctggctctgtgtggattctgccctgcaagaacaagaagcggagaaagctgcggcccaagcggctggactttcaccctagatcttctagcggcgtgtccgtgatcaccatgaagctgtgggagaagcacttcaagggcctgaactggaacctggtcgtctggattctgaacctgaagatgatgaacatcgagatcacccctcagcggagcaaggccagaaagtccggcgtgatgaagtgctgggatctgtgccccagcgagaagaagaggaagctgcctctgcctctgaccttcagcaccctgctgtgggactctagacatagaggcgccagctccagcaccagcagagactccagaagctttttcaccagcgctcaccccagcagaccctgcagaatgagactgtaccagttcctgatccacctgagaaaggtggacacccaccatctgcaggtcgtgaccaagaccgtgacagccacaacagctgacggccagagaatgcggagactgaagtgcaaggcctgccggctgagatgggctagacctgaacctgctgctcaggcccctccaaagagccactttccacctcatcctagcggccctagcagaaccagttctctgcagctgcggagcatccctcacgtgccaaaagccacagccgctcacagcgtgacagtgaagctgcagaagggaaagaacagcccctgctgccaaaagaaactgcgggtgcagaatcagggccatctgctgatgatcctgctgcacaatacctacatggaaatgcactacggccatcaggccccacaggtggccatgctgcctaagctgctgtgcagacagatgctgcccactctgagcacactgcagcaaagacacccacagggcccttgtcctccacctgtgacaccactgagagtccagtctgtcctgctgctgggagtgcctcagacagctgctagacagcctagcagacccaccggcagaacccctaccacaagactgatggcccctgtcggcagcgtgatgagctgttctctgctgacccagccttctccagccagcgcctgtacaatgcctccactgctgcatcctcagtgggccccacattctgctggattgtctcccggcgcttgcagacctgcctgtacctgtatcagcatgaccaccatctccagagccacctggcaggtttccgtgtacagcggcaatctgctgagcttctccagacggggcatgaagagtagcgtgcggctgaaaaacagccggcggaacagacggtacagaaagatctacggcgagctgaagatgtccctgcaggccgtggctcctagatgtcctagatctgccgtggacatcagccccggacctacctctcctagcctggcctcttgtgcctctgtggccattggaaaactggccctgcttggcgcttctgccccttgtggtgctgctggcgctagagaggctggaagatttgccgtgctgggcaccatggtcatgaagcacctgaaccgcaagctgcatctgacccggtcctgcctgatcgatctgaccatgatgatgagccagaagctctggaagaaccagcggaagagaatccctctgccatctcctagacagcatctgctccctcagtaccctctgcaccctcctccaccttgtctgctgctgctccaccacagacaccacctggcctttctggaaatggcctgcagcagccagcacacccactccatcaagatctggatcagctttagccacgagcagagcagcccattcctggccagatcctggaacaccatgcagtggaacaacaagaaaatggccatgacagtgatcgctggcgcccaccactgtcagtacaagctgacctacaccaaagtgtggaagatgaattggaagaaaatgatgatcggctcccagcacctcctgttcagccctctggatagctctccactgcaactgctgcttcaccctcacggcaagagatgcaacccttgctgcagactgacatggatgtccatgctgcagaaacagtgctgctacaacctcgtgatcaagcacccactgatcttcagaatcaacctgcggagacagggcaagaccaaggatggcgttgtgcagagcctgggcttcctgaaccagcagatcatcctgcagaaagagttcttcatctgcctgctcatgtttatcaagcggtggaagcctgccgccaccaagagagagtgggagaaacgcaagcagatcctcggcggaggcggcaagtacaaagagtacttcctgaagcgcatcctgattcggaaggccatgactgtgctggccggcgacaagaaaggcctgggcagattcatgagatgcgtgcagagcgagacaaaggccgttagcctgcagctcccactcggaagaggccctgtgtactacgtgtgcaaccggatgaacgtgtccagcgtgctgaagcccttcctgttcaccgtgcctatcgaggacatgagagagtgcacactgggccgcaacagaatgaatgtgtcctctgtgctgaaaccctgtctgatccctgtgccaatcgacctgcctcggatgctgccaatcagcagcccactgcacagaccccagatgccattctggacctgcacctttcctgccacaacatggggcacctgggagacaccttctacatggggctggcggacctttcggggccctagaagaaaagtgctgatggtgctgtggctgcccgccaaccagagtctgcagaaaagccaagtgttccagtgggtcctgcggaccgagaacatccggaagctgatctggaccaagcagcggagcttcctgtctctgttccccaagctgagagccaccgaacagatgaccaatgtgggctgcgccttcagcggccggattctgcatcaacctgaaatggccgccatgcggctgatgcccaagttcctgaatagcaccaacagctggtggacctgtaccaacctgagcgtgcccatgatgctgaccattctgatttggaagcgggtgttcattctcctgctgtccgacaagaagctgctgaagaagtctagccagctgaggcggtcttggagaaacgtgtcccggatcagccaccagatgaagtgtctgaccgccgtggactgtctgcaggccttctgggacatgaacatggaacaccggctgaccatggacagcgccctgagcctgacaaagagagagggacccgagacttgcaagaagaagctcctgctgaaactgctgacaatgagcctgagcaacatcctgatgaagttccggctgcggctgagaatcccaagcctgaggaagtatcgccagcatctgaaaaagaccagcgccaagggcgagaagctgaagcactgctttaaggcttggggcagaggcccacctctgcacacaagaagccagaagaaagaccctgccggcaagctgaaaaaactgaccacactgagcttcgtgctgatcgaggaacggcggaacctgcagcggaatctgaaagtcctgtggctcaagaaaagcaccaagagccggtatctgttcttcctgaccgtgtgcggcttcttcgagaagaaacggcctgagtggctgtcctccagaaagaagggacacacaaagaatcggaggaaggccaagcggaagccccagatcgtgcacaagaagagaggcctgttcctcaaaaagaaatacctggtgcagggcgccaagaagatcaccttcctgtccaacggcatggaagcttgcggcacacaccccacaccaagactgagcgacagagtgttcctggtcaagatcaccaccaccacaagcagccccagaagaagcccagcactgagagctagaggcggcaccacaattggcgaagtgaccagcctgtgcttcttctacctgctgtacggctacccctacgatgtccctgactatgcgtcctaaaggcgcgcctagcggccgc

SEQ ID NO: 1150 - DNA, 5299 bp, Artificial Sequence
  Cloning cassette hINV 4A
gaattcggatcccgcgacttcgccgccatgcatcgacggcgctcacggagttgccgggaagaccaaaagcctgtgatggacgatcagcgggaccttatttctaacaatgaacaacttccgatgcttggtaggcggcctggagcaccagagtccaagtgttctaggggcgccctgtacactggtttctccatcctcgtgacactgttgctggcgggacaggcaacaactgcgtatttcttgtatcagcagcaaggaagactggataagcttacagttacatcccagaatctccaacttgaaaacctcagaatgaagcttccgaagcccccaaagcccgtctccaaaatgaggatggcgacaccgctccttatgcaagcccttcccatgggggctctgccccaagggccaatgcagaacgctacaaagtatggaaatatgacagaggatcatgtcatgcatttgcttcaaaacgctgatccccttaaagtttaccctcctctgaaggggagctttccagaaaatcttcgacatctcaagaacacgatggaaacgattgactggaaggtgtttgagagctggatgcaccattggctcctgttcgagatgtcccggcattctctggagcaaaagccgacggacgcacctcccaaggaaagcctggaattggaggacccgagtagtgggctgggcgtcacaaagcaagacctgggacccgtgccgatgatccagaagaagaaacagaaatccatggccaagaagtcccagcagcctctggtgctgaagaagaaccggaagcaagagtggggaggacaggcccacagacagagaaacaacgccaagaagatgcccttccaagaggaaaagaagaacggccggatcagcagcagcctgatcctgagcttccagagagtgaaggacagcaagaaaatgacccagaagatgtgcagctctctggccctgcctacaggcctgacatctctgatcctgcctagcagcgatctggccgtgctgatctctagcagcaccagccactttctgatgcggagccctgtgctgccaagctccagactgacatgtgcctctccacagctgccccggatgtggacatggtctagctggctgaagcaccccagaaccgctagcatcacactgcctaccacaagcctgaagggcagcagaaccagctgctgcccaagatctcaccccagactgcctaggaccaagtggcctctgcagtgtctgctgcacagcctgggaacaacaggcacactcgtttgggaaaggggcgtgctgcagatgagaagcctcgaagcccattgtcctctgcagaccttccatctgcaccactgcagaacccagccaagctcttgtcctcctgcctggattctgtaccaaggccagtggagcggagccgtcgttggacttagacccgtggctcaccatctgcctagacctatccagggcctgcactgtcctcaggctcctcatcaacctgctctgagctggggaaagtggcccgtgggaatgacaggacctgccagatgctgtcggtggccccgcagatctcagaagtctcagcatcactgcgccctgcggaagatcgagtgggccacaaaactgtctctcggcggaaaagccggaccacaggctcaagagaaggccagaccttctccttgcctgtcctggtccagcagaattgtggcccctggacacgccctgagctgtcggactcgtagaagatggtcctccaagtgcagaggcggccctagcgccagcgatagatgttgtagctgtagccccagcggcttcagcgccggaagaggcagatgtcctgtgcagggatgtctgaggccacacagagttcagctgctgagaagatggggcccaggatctcctgctggccagagactgtctaagggcttccaactgctgcgttggtggggacctggatctccagctcctgagcctagaaagggcccatttcctccacctgatcctccatggcctgtgaccgctgtgacagtgatggctggctctgtgcctagcgcacagtctgtggatgccctggaatctcctggacctctggctctggaaggccctagcagccctagaaacctgctgtggcgggaaatgagcatctttctgcccggcatcttctgccaaaagaaggtgccatctgccagcccctggggacttgttcctccttctccaccactcgctctgggccctagaatgcagctgtgtacccagctcgccagattcttccccatcacacctccagtgtggcacatcctgggacctcagagacacacacctcaggtggtcctgagactgggcaacctgcctccattcttcagaggcagcgaggtgccctttcctagaccttgccggaccaagaacgagggcaacaatcactggcccagagtggaaatgcctaccggctggctgctcgtgggctacaacaccagaaacacagcccagaatcctcggctgcagcagcatctgaaacactggcagcagtgcacacgggccagatggtgtcaagagccttgtcagaccctgaccttcttccacttcttcttctttttcaaaacggtgtccctgtgttgtcccggctggtccaaaggacaacctccacctcctggcctgaagccttctagcctggcttctcaggtggccagaaccacaggcgtgtaccagcacgtgtggctgatctgcttcgtgttcttcgtgtgcgtggaaaccggcttctgtcacgtggcacaagtgggcctcgagagactggtttctctgagcggcatcaccgacgtgaaccattgggcccagcctaagccatctcctagcaaaggcaccggcatgaacagacccatcggcctgagagttggcaaaggcgtgtgggccagactgctcaagaagaagcctagagacatctgtcggatctccaacagaaagacccggaaggccgccagagagaagcaccgcaaaacagatagagccagcgtgtccttctggactctgctgcctacaacaggcgtgcggacaagaggaagccctctgagactgactctgtggcctcctagatgcagatgcagacgcgagtacagagtgaccatgaacatcctgaacagcctgccaagcagcatggaaatcgccgtgctgcaagaaaccgccaagaaaagccctaccagcttctgctgcaacctggacctgcagcatcagcgcagacgcaaaaagaagaaagacaaggtcgagatccggaatcggagccccaaggccaatagcacagagtgtcagggcgagcacagcagagagcagaatctgctgaatctggtgcagctgaatcctcacagccctcaccaccggaaggacgaagaggaccaccagaagagacaccaccaccacaatcaaaagaagatgagcgtcccactgttcttccacggcgacctgtgtagagagagcaccctgggcaatttctggatgaagctgctccagctgcctcagaggcctccactgcaaccagtgaccggaatggaaatcctgctttggattctgctgaagatggaaattcagatcttcaagatttgcctgggcgagatgcagctctgcacctctcggattctgaacctgcaagtgctgaaaaagatcctgcggagctttatgaagctgtaccacagcctcgtgatgtgcctgcggctgaggaccaagctggaaaaggctctgagcgccctgttcatctggcctcagcactcctacaagatcacacacccattcgccagccagccactgggacaagagatgcccaacaacacccagatccggctgctgaagcccgacaagaagaagaaaagcaccgaaaagaccaaaggccaggctttcggcagcttctccgccgatttttcagcccctcaaggacaggcttttggctccctgtgtcagctggtgtccgccgactttagcgccccacaagtgaccagactgcggagcctgaaccatctgctgatttggctgaagaattggaagcggttcaagctcaaaaagaaatatcaggcccctctgcggctgtggtcttggtgcggaacaagccagacctacttcggcagcatcatctgtatcaagaatatgttcctgcagcggaagggtttcctgaacctgagccacgtggaaaagttcgagcttaagaagaatcttctgctccccgtcgtgatcaacctgaagagactgcagaaattcatgctgaaccagaagtgcctggctccatttcctgcctgcaccagcaaagcctggacacccagaaaactcgtgggcagagccgtgcggagaaagggcattctggccatgacactgaccctgaacggaatcgaggccctgacagccctgtttacctgtagaaccgcctccatcagcgtgaacatcagcaccctgatgagcatcctggaagccatcatcaagaagatgaagaaacggatcatggtgcaccggtggatcttctccaatcagctgaccgtgcagatgctctgcctgcctctgctgacccctgacaccagatggatctttagtaatcagctgcagacagtgcaaatgctgtgtctgccacctctgaagcagggcgagagaatcatttggccactcggcggctttcagatccccaatttcttctggtccctcggcatcggacacactggcgcatggtggcatactggtagaaggcggagagagtggggcggctctaccgtgtctagaagcccactgtggatcagctccatgatctacctgagaggcatggccttcgccagcgacagctccatcagaaccaccagagtgtcctggtgtcggagatgtggcgccaagtctgccgcagcctcttcttctccactgtgggattgcagcaccacaaccggcacacaccacggatgcctgtgggagatccctagcgttaccctgctggctaacctgcacctgtgctactaccactctcagagcaacagaaacaagagccgccagatggaatccctgggcatgaagctccaacttaaaaagaaagtgaacgcctgcagcacctacacaccccacatctgcagacacacctgtcgcgtgaacgccgtcgaggaactgcactctagaaggatgtccgtgcggatcgtgaaaaattgggtgtcctgctgctacgtgcggctgtcagctgtgggactgtctacttggagcgctctggacaacaagatcatctgcaagggccacagaatcaccggctacccctacgatgtccctgactatgcgtcctaaaggcgcgcctagcggccgc

SEQ ID NO: 1151 - DNA, 5299 bp, Artificial Sequence
  Cloning cassette hINV 1B
gaattcggatcccgcgacttcgccgccatgcatcgacggcgctcacggagttgccgggaagaccaaaagcctgtgatggacgatcagcgggaccttatttctaacaatgaacaacttccgatgcttggtaggcggcctggagcaccagagtccaagtgttctaggggcgccctgtacactggtttctccatcctcgtgacactgttgctggcgggacaggcaacaactgcgtatttcttgtatcagcagcaaggaagactggataagcttacagttacatcccagaatctccaacttgaaaacctcagaatgaagcttccgaagcccccaaagcccgtctccaaaatgaggatggcgacaccgctccttatgcaagcccttcccatgggggctctgccccaagggccaatgcagaacgctacaaagtatggaaatatgacagaggatcatgtcatgcatttgcttcaaaacgctgatccccttaaagtttaccctcctctgaaggggagctttccagaaaatcttcgacatctcaagaacacgatggaaacgattgactggaaggtgtttgagagctggatgcaccattggctcctgttcgagatgtcccggcattctctggagcaaaagccgacggacgcacctcccaaggaaagcctggaattggaggacccgagtagtgggctgggcgtcacaaagcaagacctgggacccgtgccgatgaccgagatccaattgaccatgaacgacagcaagcacaagctggaaagccccgctctgaaacaggtgtcaccagcctctccacctactcagcagcctcagacacctcaggatagcagacaggtgctggccatgcctagcagctggtctagctctggcagaacccagcggaaggtggtcaagaatcctagccagcctgtgcctctgagaaacgacggcatcaccaacggcaacgactccaccagaagctgcagcatcagcctgaagaaaagcctggaaaagatgcccctcatgatgaagaagaaggacagcaccatcttcatcgtgcccatgagcctggcctgtagcatcaccgtgtctttcgtgggccagatcagcacactggtgctggatgtgtccagcatctcccactggaacaaagtgcggcagaacttcaagcggaacgccgacaagaagaacgttcggagcggcgagaagaacgacctgcagctgtttgtgatgagcgacaccacctacaagatctactggaccgtgatcctgctgaacccctgcggcaatctgcacctgaaaaccaccagcctgggcgactgtcctagaacaatggccggaccttctgcctctctgcaccctgcatctggcagagcctctagaaagacctggcagagaaggctgagagcctgtagagctggtggacctgctggatgggccagacaggccttcgataagaaaggctttgtgatcctgagcgtcggagccggaacaggcggaggacctgcttgtgttcctgtggctgaagcttctacaggcgcttggacagctgaaggcgccgctggaacaagatgtagagcttctagagccccttgcagacagctgcctgccagctctcctaccaagtgcgagatctgcgtgaagcgcagacggcggagaaagagaagcagccagtctagaagccccgtgcctaagaaacgcgagagaatgatgctgcccgtgcgggccagaacagctagatctgcacttcctcaggggagagcccctcttgagggaatgctgcttcctagagcactgcccagcctgctgtctagaatgccagccagaagagagagccggttttggctggctctgcaggcacttggactcagacctccacatctgcctagctgtcatcctctgcctcaactgcttggccctccacctcctcatcaggcccctacagctttcttcctgctggacatcattctgcggctgccctgcaaagtgaccgagtctagcaatatgggcggcaacagatccatctgcctgaccaacgccaagaaaatggaagatatgatctgggagagcacgcccctgagcatcagcagacctacatctagagccaggcagagctgttgtctgcccggactgacacatcctgctcaccagccactgggatctatgaccctggccatcagattcatcagcgctcctcagcctagctccagcacagtgacagctgctcctagcggccagtacttcaagggcaagaagcggcggaaagagatcttcaagaagaagaaacccctgacattcagccccagcctggccaaaaagaccctgaccaatagcagcttcttctacaccagcgaccgcgaggccaagaaatctatgaagcggagcatgaccctgaaggccctggtcaagacctggacacagttcagaaactaccccagagcctcctctcctggacaccctctgggacctaatggcatctgggaagtgatgcccagaacactggaaggctgcatctccgtgaaggaccacagaacaagccagaaccacagcaagtgcatcaccgagtgtgtgcggacagccctgaacagaagaagcaagatcgaggcctctcctatcggctctatcgccctgagatccatgcctaagagcagaaaccaggtgctgttcagacggaatctgaccccaagccagctgagaactctggcccctccttatatgctgctgccccagtctctgagccagagcctgagcagaaagcagatccctagccagtccatgctggtggcctctagagcaggacagtttcctgtgtggcggagaaccagcagaggaatgagcctgcagtggaagtccggcaatgcctgcacacctctgagatgccctagcagaagccctgccacattcctgacagctctgaacggctggcacagatctggactgagagcccagagaaagcgcaagcgcgagaagagaagccagaagtccaggcagaaccatctgcagctgaagtcctgccggcgcaagatctccaactggtccaagctgagaagcccctggatcttcgtgtccaagaagagactgcccaagctgaccaagtgtgaaatctgtgtcaagaacaccgccatcctggctatcaccctgatcacccctcaggaccctcatctggaccctgtgtgtcaccctcatagaaggcctggatggaagggccaccacagagtggtgttttctcatcaccctagcggcagcaccaagagccactggcagcaaagagaacgcggaggcggcagacgggaaaagaagggctgtagagagagatccctgctgtactccagaatgtgcctggtgcagatccccacacacacctgggagcccgattacttcgtgtctctgcccatgatgttcagctgggccacacagtcattccccgtgggagccgtgtttctgaccagacctgccattccttgctgtagctgcacaagccacagcaacccttggagtcagagcagacacccacacagaagcccacctacctcttgtcctccgctgctggaagcctttccactgcctagagcatccctgagagccaccgtgccaagacatagctctgtgctggcaaccggactgcatctgcacagacagatttctctgcccctgagaggattcctgctgcatcaaccactgccaggccagcatctgtggctgtctcatagactgcggctgagactgccaagaactcagcggcctcctagatccatcctgagccttagactgccactgaggccacagagaggacccagacctctgcatagatggctgcagcagaccacaggctgtagccagagaagataccccagactgaaaaccttcggcgtgccactgggctccattctgtgtctggctggatctctgagcaccatgatgatcattagcaccaccagacaagagtgtggcaggcgggcatctgtgccctgtagacctatgatcggaagcgccagaccaggaccttggagaacatctgctatgcctagcgccatgggcgtcgcactgcctacaagctgtgaatccggaagatctcctcctgccaccggcggaagaatgcctggaagccagagcattatgatgagctggatgcctcctctggctccttgtgccgcttgtccttgttctcccgctcctacactgtgtcccgctcatcctgctagagcacctacagccgtgcctgcctttacacctctgtctgcacatcctgtgcctgtgctgtctggatgtcacctggccgtcagaacctccatgctgacactgctgcctatgctgaagctggccccactgcaagtgaccaccacactgaagctgatcctggtcatgctggaaatcgtgaccgagagcactcggagagagatgccttctcaggccacaccttctccacctggaccttggcgagccgctctgggcaaagaagtgaagagatcccagagcaagctgcgcctgagaaacacaagccccatcgtgttctttctggccccatacttccccagacggatgaccagacggaccatgacaaccaccaaaatgatgatgatgcggcggaccaagcggagaaggcgcaaaaggcggagaatgacaatgatgacaaggcggaccctgctgacaaagaaaacctgtctgacccctagaaccagcgccgctaccaaagctctgccaaggcagacaatctcccagcggaggcctattcagacccctcctggaacatctctggccatctggggcaaccagcagctgaaatggacccctcacatcctgaagtccgccagcagaagggccagacctaccagctgtagcacctgtagaatgtggtggatcgccaaaaagcggatcaagctgcggcggaacagaaccagactgacactgacaggcacaagaagcagcggcaccagagcttctccatccgccgtttgcctgtgttgctggacctgtccttccagaagcttcccagccgcttctccaagcggattgagagcacctgttggagcacaggcccctccagaagttacactgagagctagctgtgcctccagcgcctctaaggcttgtgctggactttggccttggggagcacaagttcggcaaccatctttgcctggaccatgcgcttctctgctgagcacactgtctcagccacctccacaggctccatctcaagtgtggacagccgcaacactgagatgtcctgctgttccagctgctgcctgtcctcctggctacccctacgatgtccctgactatgcgtcctaaaggcgcgcctagcggccgc

SEQ ID NO: 1152 - DNA, 5281 bp, Artificial Sequence
  Cloning cassette hINV 2B
gaattcggatcccgcgacttcgccgccatgcatcgacggcgctcacggagttgccgggaagaccaaaagcctgtgatggacgatcagcgggaccttatttctaacaatgaacaacttccgatgcttggtaggcggcctggagcaccagagtccaagtgttctaggggcgccctgtacactggtttctccatcctcgtgacactgttgctggcgggacaggcaacaactgcgtatttcttgtatcagcagcaaggaagactggataagcttacagttacatcccagaatctccaacttgaaaacctcagaatgaagcttccgaagcccccaaagcccgtctccaaaatgaggatggcgacaccgctccttatgcaagcccttcccatgggggctctgccccaagggccaatgcagaacgctacaaagtatggaaatatgacagaggatcatgtcatgcatttgcttcaaaacgctgatccccttaaagtttaccctcctctgaaggggagctttccagaaaatcttcgacatctcaagaacacgatggaaacgattgactggaaggtgtttgagagctggatgcaccattggctcctgttcgagatgtcccggcattctctggagcaaaagccgacggacgcacctcccaaggaaagcctggaattggaggacccgagtagtgggctgggcgtcacaaagcaagacctgggacccgtgccgatgagaaagatgcagagcctgaatcaccccagcagactgaccaacatgagcagaacacctccaagacgcgtgtgcaaccctcggagaaagacctggaagatgcggaagaagtacgcccagaagcctagccagaagaaccacctgtacaacagccggaagaaactgctcgaggacatgaagcagaatggcttcacaggccacagagagggcagcgagtctgataatctgggcctgctgtactcctttcctcctatccggatgtgcgccctgtctcaccctagcttctacatcagcagcaccgtgtgctttctgagcaagcactgcatgaccgcctgcacacaaaagaaaggccacatgatcttcagccgcgagaagatcatcaaccccaccatcagctgcccctttcagagccccacaaagcggctggaactgagcctggaaccttggattccctacctgcaccagcagaaaacccaaggcggcaagaagagaagcaagttccctggcaccagcctgcagtgctacctgaacagatgcagcctgatggaacagatccctcacctgaagtccgcctctccacagatcatgcagagaaccagcgccgaccggttccggatgaagcggagaatgcagaacctggacaatctgggcgttccatggccactgctgcctggacctctggaaaacacacagatccccagaacaagccctctgtggaagatcacaatggtgctgacataccccaactgcgtggtgcacgtgctgatgttctggctgcctatgagatctctgggcgagccttggagagctggctttcagtggggagagtccccttggcaagtgatggctagcctgacaggcccctatcctatcagcgagggcctgaccatgaccaccggcagaaacatcaacagcaactccctgatgaccaactgcctgttcagccccatcttcctgtgccaccacgccatcatgcaccggaagatgacaagcccacacttcagactgttcagcagcaagatcccacatcctcaggtgccatctgtggtggccctgtgcaagttcagagccacatttctgctcgccctgtgggagtgtagtctgcctcaagccagactgtgcctgatcgtgtctagaaccctgctgctggttcagtctgccgctcctccacatagactgctgggcccttctagatggtccagaagccacctggacttcagcccctactggatgaagaaagtgaagctggccaacggcctgtggttcaacctgatcttcgtgctgttcaaggccgaccagagcgagtctagcctgtctagcggccggaacaagaaaacaaagctgtggttctccctcatcaacatccaccaccgcaagaatcctctgctgcccatgagaatccccagcctgaatgcccagtggatgttcctgagaatcctgcttctggcccatatgtacggcttcagcacctacggcacccagaaaggcgagtgcgtttgtctgcagtgtctgagcggcagcagcctgttcattctgaagcagcccctggacctgaagatctccaagaccttcatgctgcaagctcacccacaggtgccagctcttgctcctcaagcttggtggcctgctagaagaggccctctgacatctgctccatccgctcagcagtctctgacagctagccctcagattatgcagcggatgagcgccgtgaacttcgagacaatcatctaccctccaagcacctgtagcctgccttgtagaggcagaacactggaaagcgccggactgtttccttggctgcacacccagtgtacacacccctgtaccatgctgctgccacaaggctggtggtgtacaagaggcggcggaaagcggaaaaagaaaatgtgcaaggtgtccggcggctgcaccgcctgtgttgagagatgtccttggaagggcatctgctggaagtggccagtgacagtggctgctcagtggtctagcgtgacctctctggaatggacagcccaagagagaggctgcagcagctggctgatgaagcaaacatggatgaagtcttggtccctgcgggaccccagctacagatccatcctggaatacgtgtccaccagagtgctgtggatgcccacaagcaccgtgcggagaagaaacagcagaaagcagtctcaggtgcagctggccattcaggtgctgctcgtggacaagcacaagtactttctgttcggcagagcccgcaaccggaacatgaagaaaaccatgagccacctgatcgcccatcaggccctgaagatgagcggcctgaggctgtttcatcctcggctgctgacaagaaagaagcccggcaagttcctgcctagcagatttccttggggccctcctcctctgtgtcatcctgcttggctgagccctatctccgcctgtccaagactgctgccatatccttttcacgtgctggccctggaagtgacctttccacctggaacagccatgcctcagatgcaactgcaggccctggccatgtgggagaaaggctgggataagcggaagagaatgaagaccggcgccatccaagagaagggcgctattcaagagaaaggggccatgaccaagcggatctgcgtggtcaatttcgaggcctgcagagagatggaaagcctgagcgcccctgagaagattaccctgtttgaagcccatatggcccggtgcacctccatcaatgtgctgtgtgtcagagcctctctgatcgagaagctgatgaaagaaaagcgcaagatgaagcgcaaccaggtggcatccccacaaattatgcagaggctgttcattaagggctaccagaacaaccacttcaccttccatctgcaaaacttcgccttcttcagcagcttcggcaacaacaagtacatcaatatcctgacgcggcgcaagaaaagagaggaccactgcggactgctgatcctgatccagcacggcggcatcttcacctttcggttctgggtcgaaaagctgagctggaacatctgcaagaacctgagcctgtacctggataagttcgtgcagcggctgctgtacgtgtacatcatcgagacaaacgtgttcgtgctgaacctgttccacgtgccagtgaaccagatcttcatgatggccttctacctgaagtacaccgagaaggcctgggtcatggaactggaatggctgatccaacagcagtgttaccagcaagagaagaaaagccggaaactgatgagcagctgccgggccttcatccacacacctagaagccctggctgcagcgtgtacgccaatatgtgctgggccttttggaagcctcctagccagggcatcagctcttgtctgatgacaggctgttggggcagccctcctctgcacctgtgtcagcctctgaggcggtataagaaaaggggcgtgatcgcctggcggcggagaaagtggcagatccggcatgtgctgaaaaacctgatcctgtttcatgtgcggaacatcgtgtacggcatccaagtgatgctgtgcggcaagggactgacacaccctgtgcctctgaaacggaccctgcagaacaagaggaacaagaacatcaagcgggtcaaccagaagaagggcaacatcaagaggaagtccatcctgctgcacctcattgtgctgaatagccccgagagcaaccccaagttcttcctgacctttagccagctcgagaagaaagctacctggatgagaagaacaggcgccctgagagccacagctcctgctacagcagctcctcaggctcagactcctcattggagagccgccacaacaagcagcatgagcagcagccctagagccgagcctacatcttctagctcttgggccacctgttggcccagatgctgtagctccagctgttactggtccctgagttcttggcctcctgctggcgccgctgaggctacaaacaccagaactagaagcagagagtcccagcggggcagaatgctgacttggagaagtagtctgtggctgcagggcaccagatgttttacaggcgtgcggacaagcagcggaagctgtggcagagcttgtagctgcggaagaggctgtggaacccctagaggcgattggaagagacaccctcctcggaggaatagcgtgatcgtgcacaagatcgtgctggtgtttctgaagtccctgtccagctacaactgcgagagaaggatcagcggcatccagaagagagccatcgagtttgccgtgctgaaactgctgaatatggacctgcactggaactccgcctacctgggcagaactctgctggtcacctgtatcctgtatcaccggtggatcgtgacctccatgtgccagtctcagagatggctgaccagcaccacaagcagatccagcgctctgatgtggacccggcagatcaatcggaggaagctgcagagaaagaagaggcacccaagctggccttggaccagatgccttagaatgaggcctcctagaagcggctacccctacgatgtccctgactatgcgtcctaaaggcgcgcctagcggccgc

SEQ ID NO: 1153 - DNA, 5296 bp, Artificial Sequence
  Cloning cassette hINV 3B
gaattcggatcccgcgacttcgccgccatgcatcgacggcgctcacggagttgccgggaagaccaaaagcctgtgatggacgatcagcgggaccttatttctaacaatgaacaacttccgatgcttggtaggcggcctggagcaccagagtccaagtgttctaggggcgccctgtacactggtttctccatcctcgtgacactgttgctggcgggacaggcaacaactgcgtatttcttgtatcagcagcaaggaagactggataagcttacagttacatcccagaatctccaacttgaaaacctcagaatgaagcttccgaagcccccaaagcccgtctccaaaatgaggatggcgacaccgctccttatgcaagcccttcccatgggggctctgccccaagggccaatgcagaacgctacaaagtatggaaatatgacagaggatcatgtcatgcatttgcttcaaaacgctgatccccttaaagtttaccctcctctgaaggggagctttccagaaaatcttcgacatctcaagaacacgatggaaacgattgactggaaggtgtttgagagctggatgcaccattggctcctgttcgagatgtcccggcattctctggagcaaaagccgacggacgcacctcccaaggaaagcctggaattggaggacccgagtagtgggctgggcgtcacaaagcaagacctgggacccgtgccgatgggagctgctgctgcctcttgtcagtctcctccttctcctcgggaaaccacacctagctccgacgccaccagacggacaagaccaattgccgctcagagcaagaaaaccatgacagccgccggactgacccctaagaacaagaagcggagaaagctgcggcccaagatgatccggaagatccagaagagaaggcggaccgccaaccggcggaatagcagaagggctacccctacaagcaagggcagcctgagaagaaagtacctgagagtgcggggacctcctctgcacacccggaacatcagaaagctgatctggaccaagcagcggagcttcctgtctctgttccccaagctgagagccaccgagcagatgaccaatgtgggctgctctatccctcacgtgcccaaagccacagccgctcactctgtgacagtgaaactgcagctgcccctgaccttcagcaccctgctgtgggatagcagacacaccatgagcctgagcaacatcctgatgaagttccggctgcagtctagcccattcctggccagatcctggaacaccatgcagtggaacaacaagaaaatggccatgaccgtgatcgctggcgcccaccactgtcagtacaagctgacctacaccaaagtgtggaagatgaactggaagaaaatgatgatcggcagccagcatctgctgttcagccctctggatagcagtcccctgcagctcctgctgcaccctcacggcaagagatgcaacccttgctgcagactgacctggatgagccagaacaccagaagcaccaacctggaaaagaaccccagcctgaagaagcagagccagcggagaggaaagctgagcgcctttagcggcagaatcctgcaccagccagaaatggccgccatgagactgatgcccaagttcctgaactccaccaacagctggtggaccctgaccacactgagcttcgtgctgatcgaggaagccagacagcccagcagacctaccggcagaacacctaccaccagactgatggcccctgtgggcagcgtgatgagctgttctctgctgacccagccttctccagccagcgcctgtacaatgcctccactgctgcatccacagtgggcccctcatagtgctggactttctccaggcgcttgcagacctgcctgcacctgtatcagcatgaccaccatcagcagggccacatggggcccagtgtactacgtgtgcaaccggatgaacgtgtccagcgtgctgaagcccttcctgttcaccgtgcctatcgaggacatgagagagtgcaccctgggcagaaacagaatgaatgtgtcctctgtgctgaaaccctgtctgatccctgtgccaatcagcgagaagaagaggaagctgcccaacatcgagatcacccctcagcggtctaaggccatgctgcagaagcagtgctgctacaacctcgtgatcaagcaccctctgatcttcagaatcaacctgcggcggcagggcaagaccaaagatggcgttgtgcagagcctgggcttcctcaaccagcagatcatcctgcagaaagagttcttcatctgcctgctcatgttcatcaagcggtggaagcctgccgccaccaagagcagaaagaagggccacaccaagaacagacggaaggccaagagaaagccccagatctacctgttcttcctgaccgtgtgcggctttcacctgaaaaagaccagcgccaagtggctgaagaagtccaccaagtccagatccaacggcatggaagcttgcggcacacaccccactcctagactgagctgcctgagagttagatgcggcggctggctgtgtggctggacacctagaggtagaaagtccggcgtgatgaagtgctgggatctgtgccccgtgcacaagaagagaggcctgttcagactggattttcaccccagaagcagctccggcaagggaaagaacagcccctgctgccaaaagaaactgcgggtgcagaaccagggccatctgctgatgattctgctgcacaatgaccgggtgttcctcgtgaagatcggcgagaagctgaagcactgtttcaaggcctggggctccagacggaaccggcggtacagaaagatctacggcgagctgaagatgtccctgcaggccttcctgatccacctgagaaaggtggacacccaccacctccaggtggtcaccaaaacagtgaccgccacaacagccgacggccagagaatgcggagactgaagtgcaaggcctgccggctgagatgggccagacctgaacctgctgctcaggcccctcctaagagccactttccacctcatcctagcggccccagcagaacaagtagcctgcagctgagaagcctgttctttagccactgcctgtgcagccagaagaaggaccctgccggcaagctgaaaaagctgctgaagaaaagcagccagctgcggagaagctggcgcaatgtgtccagaatcagcacccctcctccactgatcctgtggcctcaagctgctcctgtgtccgtgatcaccatgaagctgtgggagaagcacttcaagggcctgaattggaacctggtcgtgtggattctgaacctgaagatgatgacctacatggaaatgcactacggccatcaggccccacaggtggcaatgctgcctaagctgctgtgcagacagatgctgcccactctgagcacactgcagcagagacatcctcagggcccttgtcctcctcctgtgacacctctgagagtccagtctgtcctgctgctgggagtgcctcagacagccagaggacctagaagaaaggtcctgatggtgctgtggctgcccgccaatcagtctctgcagaaaagccaggttttccagtgggtgctgcggacagaggtggcccctagatgtcctagatctgccgtggacatcagccccggacctacatctcctagcctggcctcttgtgcctctgtggccattggaaagctggcactgcttggcgcctctgctccttgtggtgctgctggcgctagagaggccggaagatttgctgtgctgggcaccatggtcatgaagctttgtttcttctacctgctgtaccggctgcgcatcccaagcctgaggaagtacagacagcacctgaaccggaagctgcacctgacaagatcctgcctgatcgatctgaccatgatgatgtcccagaagctctggaagaaccagcggaagagaatccctctgccatctccacggcaacatctgctgccacagtaccctctgcacccacctccaccttgtctgctgttgctgcaccatagacaccacctggcctttctcgagatggcctgtagctctcagcacacccacagcatcaagatctggatcagcttcagccatgaagtggaccctccaggcagcgtgtggatactgccttgcgatctgcctcggatgctgccaatctcttcacccctgcacagaccccagatgcctttctggacctgcacctttcctgccacaacctggggcacatgggagacaccttctacatggggctggcggactttcagaggcgctagcagcagcacatcccgggacagcagatccttcttcacctctgctcaccctagcaggccctgcagaatgagactgtaccagtgcaagaagaagctcctcctgaaactgctgaccaccaccacaagcagccccagaagatcccctgctctgagagcaagaggcggcaccacaatcggcgaagtgaccagctgtaccaacctgagcgtgcccatgatgctgaccatcctgatttggaagcgggtgttcatcctcctgctgagcgataagaagggcgccaagaagatcaccttcctgcctattcctccacacctgagacaccctctgctgctgttcgagaagaaacggcctgagtggctgagcatggacctggacggaatgctgacagtgatcggccagggactcgtgggcatgacccctagagatctgggaacagtggcaggcgccaccgctcagattcagcgacctatccaggtgcagactggcggcagactcagaagaaacctgcagagaaacctgaaggtgctccaggtgtccgtgtacagcggcaacctgctgtcctttagcagacggggcatgaagtctagcgtgcggctgaaaaaccgcgagtgggagaaacggaagcagattctcggaggcggcggaaagtacaaagagtacttcctgaagcgcatcctcatccggaaggctatgacagtgctggccggcgacaagaaaggactgggcagattcatgagatgcgtgcagagcgagacaaaggccgtgtctctgcaactgcctctgggaagaaacatggaacaccggttgaccatggacagcgccctgagcctgacaaagagagagggacccgagacactcaaaaagaaatacctggtccagcaccagatgaagtgtctgaccgccgtggattgtctgcaggctttttgggacatgggctacccctacgatgtccctgactatgcgtcctaaaggcgcgcctagcggccgc

SEQ ID NO: 1154 - DNA, 5299 bp, Artificial Sequence
  Cloning cassette hINV 4B
gaattcggatcccgcgacttcgccgccatgcatcgacggcgctcacggagttgccgggaagaccaaaagcctgtgatggacgatcagcgggaccttatttctaacaatgaacaacttccgatgcttggtaggcggcctggagcaccagagtccaagtgttctaggggcgccctgtacactggtttctccatcctcgtgacactgttgctggcgggacaggcaacaactgcgtatttcttgtatcagcagcaaggaagactggataagcttacagttacatcccagaatctccaacttgaaaacctcagaatgaagcttccgaagcccccaaagcccgtctccaaaatgaggatggcgacaccgctccttatgcaagcccttcccatgggggctctgccccaagggccaatgcagaacgctacaaagtatggaaatatgacagaggatcatgtcatgcatttgcttcaaaacgctgatccccttaaagtttaccctcctctgaaggggagctttccagaaaatcttcgacatctcaagaacacgatggaaacgattgactggaaggtgtttgagagctggatgcaccattggctcctgttcgagatgtcccggcattctctggagcaaaagccgacggacgcacctcccaaggaaagcctggaattggaggacccgagtagtgggctgggcgtcacaaagcaagacctgggacccgtgccgatgatccagaagaagaagcagaagtccaacctggacctgcagcaccagcgcagacgcaaaaagaagaaggacaaggtcgagatccggaatcggagccccaaggccaatagcacagagtgtcagggcgagcacagcagagagcagaacctgctgaatctggtgcagctgaaccctcacagccctcaccacagaaaggacgaagaggaccaccagaagcggcaccaccaccacaatcaaaagaaaatgagcgtgatggccaagaagtcccagcagcctctcggacaggcctttggctctctgtgtcagctggtgtccgccgatttcagcgcccctcaagtgaccagactgcggagcctgaaccatctgctgatcaacgagggcaacaaccactggcctagagtggaaatgcctaccggttggctgctcgtgggctacaacaccagaaacacagcccagaatcctcggctgcagcagcacctgaaacactggcagcagtgcaccagagccagatggtgccaagagccttgtcagaccctgaccttcttccatttcttcttctttttcaaaacggtgtccctgtgctgccccggctggtctaaaggacaacctcctccacctggcctgaagccttctagcctggcttctcaggtggccagaaccacaggcgtgtaccagcacgtgtggctgatctgcttcgtgttcttcgtgtgcgtggaaaccggcttctgtcacgtggcccaagtgggactcgagagactggtgtctctgagcggcatcaccgacgtgaaccattgggcccagcctaagccatctcctagcaaaggcaccggcatgaacagacccatcggcctgagagttggcaaaggcgtgtgggccagactgagagcctccgtgtctttctggaccctgctgcctacaacaggcgtgcggacaagaggaagccctctgagactgacactgtggcctccacggaacatcctgaacagcctgcctagcagcatggaaatcgccgtgctgcaagagaaccgcaagaccagaaaggccgccagagagaagcacagaaagaccgacaacctgcacctgtgctactaccacagccagagcaaccggaacaagagccggcagatggaaagcctgggcatgaagctgcagagccctctgtgggattgctccaccacaacaggcacacaccacggctgtctgtgggagatccctagcgttacactgctggcctgcagagtgaacgccgtggaagaactgcacagcaggcggatgtctgtgcggatcgtgaagaactgggtgtcctgctgttacgtgcgcctgtctgctgtgggcctgtctacttggagcgccctggacgtggtcatcaacctgaagcggctgcagaagttcagccagaagtctcagcaccactgcgccctgagaaagatcgagtgggccacaaagctgagcctcggcggaaaagctggaccccaggctcaagagaaggccaacgccaagaagatgcccttccagcggtggatcttcagcaatcagctgaccgtgcagatgctgtgcctgcctattgaagccctgactgccctgttcacctgtcggacagccagcatcagcgtgaacatcagcaccctgatgagcatcctggaagcccctctgttttttcacggcgacctgtgcgaggaaaagaagaacggccggatcagcagccaggctcctctcagactttggtcttggtgcggcacaagccagacctactttggcagcaccgccaagaaaagccccaccagcttttgctgcgagtggggaggacaggctcaccggcagagaaataccggaatggaaatcctgctgtggattctgctcaagatggaaattcagatcttcaagatttgcctgggcgagatgcagctgtgcacctacacaccccacatctgcagacacacctgtagaggcggacctagcgccagcgatagatgctgtagctgtagccctagcggcttcagcgccggaagaggcagatgtccagttcagggatgtctgcggcctcacagagtgcagctgctgagaagatggggccctggatctcctgctggccagagactgtctaagggctttcagctgctccgttggtggggaccaggatctccagctcctgagcctagaaagggcccatttccaccacctgatcctccatggcctgtgaccgctgtgacagtgatggctggctctgtgcctagcgctcagtctgtggatgctctggaaagccctggacctctggcactggaaggacctagcagccccagaaacctgctctggcgggaaatgagcatcttcctgcctggcatcttcacctctcggattctgaacctgcaagtgctgaagaagatcctgcggagctttatgaagctgtaccactctctggtcatgtgcctgcggctgcggaccaagctggaaaaagctctgagcgctctgttcatctggccccagcacagctacaagcagaggcctcctctgcagcctgtgcaggtcgtgctcagactgggaaacctgcctccattcttcagaggcagcgaggtgccctttcctagaccttgccggaccaagatgctgaaccagaagtgtctggcccctttcatcacacacccattcgcctctcagcccctgggacaagagatgcccaacaacacccagatcagactgctgaagcccctgctgacccctgacaccagatggatcttctccaaccagctgcagacagtccagatgctctgtctgccacctctgaagcagggcgagagaatcatttggcccctcggcggctttcagatccccaacttcttttggagcctcggaatcggccacactggcgcctggtggcatactggaaggcggagaagagaatggggcggctccaccgtgtctagaagcccactgtggatcagctccatgatctacctgagaggcatggccttcgccagcgacagctccatcagaaccaccagagtgtcctggtgcagaagatgcggcgccaaatctgccgctgcctccagcctcaagaagaaaccccgggacatctgtcggatcagcgactctaagaagatgacccagaagcgcgagagcaccctgggcaatttctggatgaagctcctccagctgccagacaagaagaagaagtctaccgaaaagaccaagatcatcaagaagatgaagaaacggatcatggtccacatgtgcagctccctggctctgccaacaggcctgacatctctgatcctgccaagcagcgatctggccgtgctgatctctagctccaccagccactttctgatgcggagcccagtgctgcctagctccagactgacttgtgcctctccacagctgcccagaatgtggacctggtccagctggctgaagtggctgaaaaactggaagcggttcaagcttaaaaagaagtacatcctggccatgacgctgaccctgaacgggcatccaagaaccgcctctatcaccctgcctaccaccagcctgaagggctctagaaccagctgttgccccagatctcaccccagactgcctaggacaaagtggcctctgcagtgcctgctgcacagcctgggaacaactggaacactcgtgtgggaaaggggcgtgctgcagatgagaagtctggaagctcactgccctctgcagaccttccacctccaccactgtagaactcagcccagctcttgccctcctgcatggattctgtaccaaggacagtggagcggagccgtcgtgggacttagacctgtggctcaccatctgccaagacctattcagggcctgcactgcccacaggctccacatcaaccagctctgtcttggggcaagtggcccgtgggaatgacaggacctgccagatgttgccggtggcctagacgggaactcaaaaagaatctgctgctcccctgccggtgcagacgcgagtatagagtgacaatgggccaagccttcggcagctttagcgccgactttagcgctccccaggtgttgaagaagaatcggaagcagaacaagattatctgcaagggccaccgcatcacaagcctgatcctgagctttcagcgcgtgaaacttaagaagaaagtcaacgcctgctctcccgcctgcacctctaaagcctggactcccagaaagctcgtggggagagccgtcagaagaaagggcatcatctgtatcaagaatatgttcctgcagcggaagggtttcctgaacctgagccacgtggaaaagttcgtgcctccttctcctcctctggctctcggccctagaatgcagctctgtacccagctggcccggttcttccctatcacacctcctgtgtggcacatcctgggacctcagaggcacaccccttgtcaaaagaaggtgccctccgctagcccatggggccttagaccatctccttgcctgagctggtcctccagaattgtggcccctggacacgccctgagctgtcggactagaagaagatggtccagcaagggctacccctacgatgtccctgactatgcgtcctaaaggcgcgcctagcggccgc

SEQ ID NO: 1155 - protein, 1507 aa, Artificial Sequence
  Assembled poly-FSP polypeptide 1C
STRREMPSQATPSPPGPWRAALGKEVKRSQSKLRLRNTSPTEIQLTMNDSKHKLESPALKQVSPASPPTQQPQTPQDSRQVLAASSPGHPLGPGDCPRTMAGPSASLHPASGRASRKTWQRRLRACRAGGPAGWARQAMTLKALVKTWTQFRNYPRVGAGTGGGPACVPVAEASTGAWTAEGAAGTRCRASRAPCRQLPASSPTKCEICVKRRRRRKRSSQSRSPVPKKRERMMLPVRARTARSALPQGRAPLEGMLLPRALPSLLSRMPARRESRFWLALQALGLRPPHLPSCHPLPQLLGPPPPHQAPFDKKGFVILSKGKKRRKEIRRMTRRTMTTTKMMMMRRTKRRRRKRRRMTMMTRRTLLTKKTCLTPRTSAATKALPRQTISQRRPIQTPPGTSLAIWGRLPLRPQRGPRPLHRWLQQTTGCSQRRIAKKRIKLRRNTLAIRFISAPQPSSSTVTAAPSGQYFSSFFYTSDRTKCEICVKNTAILAITLITPQDPHLDPVCHPHRRPGWKGHHRVVFSHHPSGSTKSHWQQRERGGGRREKKGCREMPSSWSSSGRTADKKNVRSRTRLTLTGTRSSGTRASPSAVCLCCWTCPSRSFPAASPSGLRAPVGAQAPPEVTLRASCASSASKACAGLWPWGAQVRNKVRQNFKRNLAKKTLTNALRSMPKSRNQVLFRRNLTPSQLRTLAPPYMLLPQSLSQSLSRKQIPSQSMLVTAFFLLDIILRSLLYSRMCLVQIPTHTWEPDYFVSLPMMFSWATQSFPVGAVFLTRPAIPCCSCTSHSNPWSQSFKKKKPLTFSPSVPMSLACSITVSFVGQISTLVLDVSSISHWRKRKREKRSQKSRQNHLQLKSCRRKISNWSKLRSPWIFYPRLKTFGVPLGSILCLAGSLSTMMIISTTRQECGRRASVPCRPMIGSARPGPWRTSAMPSAMGVALPTSCESGRSPPATGGRMPGSQSIMMSWMPPLAPCAACPCSPAPTLCPAHPARAPTAVPAFTPLSAHPVPVLSGCHLAVRTSMLTLLPMRHPHRSPPTSCPPLLEAFPLPRASLRATVPRHSSVLATGLHLHRQISLPLRGFLLHQPLPGQHLWLSHRLRLRLPRTGEKNDLQLFVMSDTTYKIYWTVILLNPCGNLHLKTTSLRRARPTSCSTCRMWWLKLAPLQVTTTLKLILVMLEIVTEEAKKSMKRSRRSKIEASPIGSIMKKKDSTIFINQQLKWTPHILKSASVSKKRLPKLNGIWEVMPRTLEGCISVKDHRTSQNHSKCITECVRTALNQRKVVKNPSQPVPLRNDGITNGNDSTRSCSISLKKSLEKMPLMNAKKMEDMIWESNMGGNRSICLTRLPCKVTESSQRPPRSILSLASRAGQFPVWRRTSRGMSLQWKSGNACTPLRCPSRSPATFLTALNGWHRSGLRAQQPSLPGPCASLLSTLSQPPPQAPSQVWTAATLRCPAVPAAACPPIVFFLAPYFPTPLSISRPTSRARQSCCLPGLTHPAHQPLGSM

SEQ ID NO: 1156 - protein, 1501 aa, Artificial Sequence
  Assembled poly-FSP polypeptide 2C
RQINRRKLQRKKRRKKREDHCGLRARNRNMKKTMSHLIAHQALKMSGLRLFHPRLLTRKKPGKNPRRKTWKMRKKYAQKPSQKNHLYGKGLTHPVPLKRTLQNKRNKNIKRVNQKKGNIKRKSILLHLIVLNSPESNLQAHPQVPALAPQAWWPARRGPLTSAPSAQQSLTFLPSRFPWGPPPLHWNSAYLGRTLLVTCILYHRWIVTSMCQSQRWLTSTTSRSSALMWTQWSSVTSLEWTAQERGCSSWLMKQTWMKSWSLRDPSYRSILEYVSTRVLWMPTSTVGALRATAPATAAPQAQTPHWRAATTSSMSSSPRAEPTSSSSWATCWPRCCSSSCYWSLSSWPPAGAAEATNTRTRSRESQRGRMLTWRSSLWLQGTRCFTGVRTSSRHPSWPWTRCLRMRPPRSNSRKKLLEDMKQNGFTRYKKRGVIAWRRATFLLALWECSLPQARLCLIVSRTLLLVQSRCSLMEQIPHLKSWWCTRGGGKRKKKMCKVSGGCTACVERCPWKGICWKWPVTVAALILIQHGGIFTFRFWVEKLSWNICKNLSLYLDKFVQRLLYVYIIETNVFVLNLFHVPVNQIFMMAFYLKYTEKAWVMELEWLIQQQCYQLLLAHMYGFSTYGTQKGECVCLQCLSGSSLFILKQPLDLKISKTFMSRSHLDFSPYWMKKVKASPQIMQRMSAVNFETIRRKWQIRHVLKNLPLENTQIPRTSPLWKITMVLTYPNCVVHVLMFVLFKADQSESSLSSGIYPPSTCSLPCRGIRMCALSHPSFYISSTVCFLSKHCMTACTREKIINPTISCPFQSPTKRLGHREGSESDNLGLLYSFPPWLPMRSLGEPWRAGFQWGESPWQVMASLTGNSVIVHKIVLVFLKSLSSYNCERRISGIQKRAIEFAVLKLLNMDLASPQIMQRTSADRFRMKRRMQNLDNLGVPWPLLPGAAPPHRLLGPSRWILFHVRNIVYGIQVMLCRRRNSRKQSQVQLAIQVLLVDKHKYFLFGPYPISEGLTMTTGRNINSNSLMTNCLFSPIFLCHHAIMHRKMTSPHFRLFSSKIPHPQVPSVVALCKFLANGLWFNLIFQKKGHMIFSPKFFLTFSQRTLESAGLFPWLHTQCRNKKTKLWFSLINIHHRKNPLLPMRMSRTPPRRVCGSPPLHLCQPLRGGKKRSKFAFWKPPSQGISSCLMTGCWGSCGRACSCGRGCGTPRGDWKRHPPRRELSLEPWIPYLHQQKTQRKRMKTGAIQEKGAIQEKGAMTKRICVVNFEACREMESLSAPEKITLFEAHMARCTSINVLCVRASLIEKLMKEKRKMKRNQVASPQIMQRLFIKGYQNNHFTFHLQNFAFFSSFGNNKYINILTRAFIHTPRSPGCSVYANMCWRKMQSLNHPSRLTNCHPAWLSPISACPRLLPYPFHVLALEVTFPPGTAMPQMQLQALAMWEKGWDKQEKKSRKLMSSCLEKKATWMRRTPGTSLQCYLNTHPCTMLLPQGIPSLNAQWMFLRI

SEQ ID NO: 1157 - protein, 1506 aa, Artificial Sequence
  Assembled poly-FSP polypeptide 3C
PIPPHLRHPLLLKNKKRRKLRPKSRKKGHTKNRRKAKRKPQIRNSRRATPTSKGSLRRKYLRVGAAAASCQSPPSPRETTPSSDATRRTRPIAAQSKKTMTAAGLTPSQKKDPAGKLKKQVSVYSGNLLSFSRRGMKSSVRLKNCTNLSVPMMLTILIWKRVFILLLSDKKSIPHVPKATAAHSVTVKLQSRRNRRYRKIYGELKMSLQASNGMEACGTHPTPRLSVSVITMKLWEKHFKGLNWNLVVWILNLKMMLKKKYLVQREWEKRKQILGGGGKYKEYFLKRILIRKAMTVLAGDKKGLGRFMRCVQSETKAVSLQLPLGRMDLDGMLTVIGQGLVGMTPRDLGTVAGATAQIQRPIQVQTGGRLRGPRRKVLMVLWLPANQSLQKSQVFQWVLRTELPLTFSTLLWDSRHDLPRMLPISSPLHRPQMPFWTCTFPATTWGTWETPSTWGWRTFARQPSRPTGRTPTTRLMAPVGSVMSCSLLTQPSPASACTMPPLLHPQWAPHSAGLSPGACRPACTCISMTTISRATWRRNLQRNLKVLRLRIPSLRKYRQQNTRSTNLEKNPSLKKQSQRRGKLSLTTLSFVLIEELLKKSSQLRRSWRNVSRISNIRKLIWTKQRSFLSLFPKLRATEQMTNVGCRLDFHPRSSSGDRVFLVKIQSSPFLARSWNTMQWNNKKMAMTVIAGAHHCQYKLTYTKVWKMNWKKMMIGSQHLLFSPLDSSPLQLLLHPHGKRCNPCCRLTWMSHLNRKLHLTRSCLIDLTMMMSQKLWKNQRKRIPLPSPRQHLLPQYPLHPPPPCLLLLHHRHHLAFLEMACSSQHTHSIKIWISFSHETMSLSNILMKFRLTTTTSSPRRSPALRARGGTTIGEVTSSLFFSHCLCVAPRCPRSAVDISPGPTSPSLASCASVAIGKLALLGASAPCGAAGAREAGRFAVLGTMVMKNMEHRLTMDSALSLTKREGPETGPVYYVCNRMNVSSVLKPFLFTVPIEDMRECTLGRNRMNVSSVLKPCLIPVPICKKKLLLKLLRGASSSTSRDSRSFFTSAHPSRPCRMRLYQMLQKQCCYNLVIKHPLIFRINLRRQGKTKDGVVQSLGFLNQQIILQKEFFICLLMFIKRWKPAATKKGKNSPCCQKKLRVQNQGHLLMILLHNRGPPLHTRFEKKRPEWLSRKSGVMKCWDLCPAFSGRILHQPEMAAMRLMPKFLNSTNSWWTVHKKRGLFHQMKCLTAVDCLQAFWDMSEKKRKLPMIRKIQKRRRTANRNIEITPQRSKAHLKKTSAKGAKKITFLCLRVRCGGWLCGWTPRGWLKKSTKSRLCFFYLLYYLFFLTVCGFTPPPLILWPQAAPGEKLKHCFKAWGVDPPGSVWILPCFLIHLRKVDTHHLQVVTKTVTATTADGQRMRRLKCKACRLRWARPEPAAQAPPKSHFPPHPSGPSRTSSLQLRTYMEMHYGHQAPQVAMLPKLLCRQMLPTLSTLQQRHPQGPCPPPVTPLRVQSVLLLGVPQTA

SEQ ID NO: 1158 - protein, 1507 aa, Artificial Sequence
  Assembled poly-FSP polypeptide 4C
DSKKMTQKNRKTRKAAREKHRKTDNLDLQHQRRRKKKKDKVEIRNRSPKANSTECQGEHSREQNLLNLVQLNPHSPHHRKDEEDHQKRHHHHNQKKMSVNEGNNHWPRVEMPTGWLLVGYNTRNTAQNPRLQQHLKHWQQCTRARWCQEPCQTLTFFHFFFFFKTVSLCCPGWSKGQPPPPGLKPSSLASQVARTTGVYQHVWLICFVFFVCVETGFCHVAQVGLERLVSLSGITDVNHWAQPKPSPSKGTGMNRPIGLRVGKGVWARLWLKNWKRFKLKKKYTGMEILLWILLKMEIQIFKICLGEMQLCLKKKVNACSNAKKMPFQCRCRREYRVTMIQKKKQKSPLFFHGDLCRPSPCLSWSSRIVAPGHALSCRTRRRWSSKMAKKSQQPLCRGGPSASDRCCSCSPSGFSAGRGRCPVQGCLRPHRVQLLRRWGPGSPAGQRLSKGFQLLRWWGPGSPAPEPRKGPFPPPDPPWPVTAVTVMAGSVPSAQSVDALESPGPLALEGPSSPRNLLWREMSIFLPGIFNLHLCYYHSQSNRNKSRQMESLGMKLQITHPFASQPLGQEMPNNTQIRLLKPGQAFGSFSADFSAPQQAPLRLWSWCGTSQTYFGSIEALTALFTCRTASISVNISTLMSILEAILAMTLTLNGSPLWDCSTTTGTHHGCLWEIPSVTLLATAKKSPTSFCCQRPPLQPVEEKKNGRISSVPPSPPLALGPRMQLCTQLARFFPITPPVWHILGPQRHTPLLTPDTRWIFSNQLQTVQMLCLPPLKQGERIIWPLGGFQIPNFFWSLGIGHTGAWWHTGRRRREWGGSTVSRSPLWISSMIYLRGMAFASDSSIRTTRVSWCRRCGAKSAAASSDKKKKSTEKTKNKIICKGHRITQVVLRLGNLPPFFRGSEVPFPRPCRTKCQKKVPSASPWGLHPRTASITLPTTSLKGSRTSCCPRSHPRLPRTKWPLQCLLHSLGTTGTLVWERGVLQMRSLEAHCPLQTFHLHHCRTQPSSCPPAWILYQGQWSGAVVGLRPVAHHLPRPIQGLHCPQAPHQPALSWGKWPVGMTGPARCCRWPRRMCSSLALPTGLTSLILPSSDLAVLISSSTSHFLMRSPVLPSSRLTCASPQLPRMWTWSSWLKEWGGQAHRQRNCRVNAVEELHSRRMSVRIVKNWVSCCYVRLSAVGLSTWSALDSLILSFQRVKTSRILNLQVLKKILRSFMKLYHSLVMCLRLRTKLEKALSALFIWPQHSYKGQAFGSLCQLVSADFSAPQVTRLRSLNHLLIRWIFSNQLTVQMLCLPIIKKMKKRIMVHVLKKNRKQIICIKNMFLQRKGFLNLSHVEKFRESTLGNFWMKLLQLPPACTSKAWTPRKLVGRAVRRKGVVINLKRLQKFRASVSFWTLLPTTGVRTRGSPLRLTLWPPRSQKSQHHCALRKIEWATKLSLGGKAGPQAQEKANILNSLPSSMEIAVLQEMLNQKCLAPFELKKNLLLPTYTPHICRHTLKKKPRDICRIS

SEQ ID NO: 1159 - protein, 1507 aa, Artificial Sequence
  Assembled poly-FSP polypeptide 1D
ADKKNVRSASSPGHPLGPRRMTRRTMTTTKMMMMRRTKRRRRKRRRMTMMTRRTLLTKKTCLTPRTSAATKALPRQTISQRRPIQTPPGTSLAIWGRRSKIEASPIGSITPLSISRPTSRARQSCCLPGLTHPAHQPLGSMVGAGTGGGPACVPVAEASTGAWTAEGAAGTRCRASRAPCRQLPASSPTKCEICVKRRRRRKRSSQSRSPVPKKRERMMLPVRARTARSALPQGRAPLEGMLLPRALPSLLSRMPARRESRFWLALQALGLRPPHLPSCHPLPQLLGPPPPHQAPGEKNDLQLFVMSDTTYKIYWTVILLNPCGNLHLKTTSLNAKKMEDMIWESNQQLKWTPHILKSASIAKKRIKLRRNSTRREMPSQATPSPPGPWRAALGKEVKRSQSKLRLRNTSPFDKKGFVILSNMGGNRSICLTIVFFLAPYFPMPSSWSSSGRTRLPLRPQRGPRPLHRWLQQTTGCSQRRGDCPRTMAGPSASLHPASGRASRKTWQRRLRACRAGGPAGWARQARKRKREKRSQKSRQNHLQLKSCRRKISNWSKLRSPWIFEAKKSMKRSQRPPRSILSLFKKKKPLTFSPSVSKKRLPKLKGKKRRKEIQRKVVKNPSQPVPLRNDGITNGNDSTRSCSISLKKSLEKMPLMRSLLYSRMCLVQIPTHTWEPDYFVSLPMMFSWATQSFPVGAVFLTRPAIPCCSCTSHSNPWSQSTLAIRFISAPQPSSSTVTAAPSGQYFALRSMPKSRNQVLFRRNLTPSQLRTLAPPYMLLPQSLSQSLSRKQIPSQSMLVRTRLTLTGTRSSGTRASPSAVCLCCWTCPSRSFPAASPSGLRAPVGAQAPPEVTLRASCASSASKACAGLWPWGAQVRMKKKDSTIFIYPRLKTFGVPLGSILCLAGSLSTMMIISTTRQECGRRASVPCRPMIGSARPGPWRTSAMPSAMGVALPTSCESGRSPPATGGRMPGSQSIMMSWMPPLAPCAACPCSPAPTLCPAHPARAPTAVPAFTPLSAHPVPVLSGCHLAVRTSMLTLLPMMTLKALVKTWTQFRNYPRRHPHRSPPTSCPPLLEAFPLPRASLRATVPRHSSVLATGLHLHRQISLPLRGFLLHQPLPGQHLWLSHRLRLRLPRTTEIQLTMNDSKHKLESPALKQVSPASPPTQQPQTPQDSRQVLAVPMSLACSITVSFVGQISTLVLDVSSISHWNGIWEVMPRTLEGCISVKDHRTSQNHSKCITECVRTALNTKCEICVKNTAILAITLITPQDPHLDPVCHPHRRPGWKGHHRVVFSHHPSGSTKSHWQQRERGGGRREKKGCREASRAGQFPVWRRTSRGMSLQWKSGNACTPLRCPSRSPATFLTALNGWHRSGLRAQTAFFLLDIILRRARPTSCSTCRMWWRLPCKVTESSLAKKTLTNQPSLPGPCASLLSTLSQPPPQAPSQVWTAATLRCPAVPAAACPPLKLAPLQVTTTLKLILVMLEIVTENKVRQNFKRNSSFFYTSDR

SEQ ID NO: 1160 - protein, 1501 aa, Artificial Sequence
  Assembled poly-FSP polypeptide 2D
RKMQSLNHPSRLTNNPRRKTWKMRKKYAQKPSQKNHLYRQINRRKLQRKKSRSHLDFSPYWMKKVKRARNRNMKKTMSHLIAHQALKMSGLRLFHPRLLTRKKPGKQKKGHMIFSRRKWQIRHVLKNLIPSLNAQWMFLRIASPQIMQRTSADRFRMKRRMQNLDNLGVPWPLLPGLLLAHMYGFSTYGTQKGECVCLQCLSGSSLFILKQPLDLKISKTFMASPQIMQRMSAVNFETILQAHPQVPALAPQAWWPARRGPLTSAPSAQQSLTRTLESAGLFPWLHTQCRAFIHTPRSPGCSVYANMCWRYKKRGVIAWRIYPPSTCSLPCRGLILIQHGGIFTFRFWVEKLSWNICKNLSLYLDKFVQRLLYVYIIETNVFVLNLFHVPVNQIFMMAFYLKYTEKAWVMELEWLIQQQCYQRKRMKTGAIQEKGAIQEKGAMTKRICVVNFEACREMESLSAPEKITLFEAHMARCTSINVLCVRASLIEKLMKEKRKMKRNQVASPQIMQRLFIKGYQNNHFTFHLQNFAFFSSFGNNKYINILTFLPSRFPWGPPPLGALRATAPATAAPQAQTPHWRAATTSSMSSSPRAEPTSSSSWATCWPRCCSSSCYWSLSSWPPAGAAEATNTRTRSRESQRGRMLTWRSSLWLQGTRCFTGVRTSSRCSLMEQIPHLKSNSRKKLLEDMKQNGFTRRRNSRKQSQVQLAIQVLLVDKHKYFLFGRATFLLALWECSLPQARLCLIVSRTLLLVQSRHPSWPWTRCLRMRPPRSHWNSAYLGRTLLVTCILYHRWIVTSMCQSQRWLTSTTSRSSALMWTWWCTRGGGKRKKKMCKVSGGCTACVERCPWKGICWKWPVTVAAMSRTPPRRVCGHREGSESDNLGLLYSFPPVLFKADQSESSLSSGNSVIVHKIVLVFLKSLSSYNCERRISGIQKRAIEFAVLKLLNMDLGKGLTHPVPLKRTLQNKRNKNIKRVNQKKGNIKRKSILLHLIVLNSPESNREKIINPTISCPFQSPTKRLGSPPLHLCQPLRPYPISEGLTMTTGRNINSNSLMTNCLFSPIFLCHHAIMHRKMTSPHFRLFSSKIPHPQVPSVVALCKFTHPCTMLLPQGAFWKPPSQGISSCLMTGCWQWSSVTSLEWTAQERGCSSWLMKQTWMKSWSLRDPSYRSILEYVSTRVLWMPTSTVPKFFLTFSQIRMCALSHPSFYISSTVCFLSKHCMTACTPGTSLQCYLNLANGLWFNLIFRNKKTKLWFSLINIHHRKNPLLPMRLEKKATWMRRTELSLEPWIPYLHQQKTQWLPMRSLGEPWRAGFQWGESPWQVMASLTGRRKKREDHCGLQEKKSRKLMSSCAAPPHRLLGPSRWGSCGRACSCGRGCGTPRGDWKRHPPRRILFHVRNIVYGIQVMLCCHPAWLSPISACPRLLPYPFHVLALEVTFPPGTAMPQMQLQALAMWEKGWDKPLENTQIPRTSPLWKITMVLTYPNCVVHVLMFGGKKRSKF

SEQ ID NO: 1161 - protein, 1506 aa, Artificial Sequence
  Assembled poly-FSP polypeptide 3D
QNTRSTNLEKNPSLKKQSQRRGKLSSRKKGHTKNRRKAKRKPQISQKKDPAGKLKKHLNRKLHLTRSCLIDLTMMMSQKLWKNQRKRIPLPSPRQHLLPQYPLHPPPPCLLLLHHRHHLAFLEMACSSQHTHSIKIWISFSHEDLPRMLPISSPLHRPQMPFWTCTFPATTWGTWETPSTWGWRTFGPVYYVCNRMNVSSVLKPFLFTVPIEDMRECTLGRNRMNVSSVLKPCLIPVPILTTLSFVLIEESRRNRRYRKIYGELKMSLQALPLTFSTLLWDSRHTTTTSSPRRSPALRARGGTTIGEVTSRGASSSTSRDSRSFFTSAHPSRPCRMRLYQSNGMEACGTHPTPRLSRGPPLHTRTMSLSNILMKFRLMLQKQCCYNLVIKHPLIFRINLRRQGKTKDGVVQSLGFLNQQIILQKEFFICLLMFIKRWKPAATKTPPPLILWPQAAPVHKKRGLFSLFFSHCLCHQMKCLTAVDCLQAFWDMMIRKIQKRRRTANRLKKKYLVQCTNLSVPMMLTILIWKRVFILLLSDKKCLRVRCGGWLCGWTPRGKNKKRRKLRPKHLKKTSAKVSVITMKLWEKHFKGLNWNLVVWILNLKMMWLKKSTKSRQSSPFLARSWNTMQWNNKKMAMTVIAGAHHCQYKLTYTKVWKMNWKKMMIGSQHLLFSPLDSSPLQLLLHPHGKRCNPCCRLTWMSREWEKRKQILGGGGKYKEYFLKRILIRKAMTVLAGDKKGLGRFMRCVQSETKAVSLQLPLGRRKSGVMKCWDLCPRLDFHPRSSSGGEKLKHCFKAWGLCFFYLLYFEKKRPEWLSVDPPGSVWILPCMDLDGMLTVIGQGLVGMTPRDLGTVAGATAQIQRPIQVQTGGRLFLIHLRKVDTHHLQVVTKTVTATTADGQRMRRLKCKACRLRWARPEPAAQAPPKSHFPPHPSGPSRTSSLQLRPIPPHLRHPLLLKGKNSPCCQKKLRVQNQGHLLMILLHNARQPSRPTGRTPTTRLMAPVGSVMSCSLLTQPSPASACTMPPLLHPQWAPHSAGLSPGACRPACTCISMTTISRATWRLRIPSLRKYRQNIEITPQRSKAQVSVYSGNLLSFSRRGMKSSVRLKNSIPHVPKATAAHSVTVKLQYLFFLTVCGFDRVFLVKICKKKLLLKLLRGPRRKVLMVLWLPANQSLQKSQVFQWVLRTETYMEMHYGHQAPQVAMLPKLLCRQMLPTLSTLQQRHPQGPCPPPVTPLRVQSVLLLGVPQTAAFSGRILHQPEMAAMRLMPKFLNSTNSWWTVAPRCPRSAVDISPGPTSPSLASCASVAIGKLALLGASAPCGAAGAREAGRFAVLGTMVMKGAAAASCQSPPSPRETTPSSDATRRTRPIAAQSKKTMTAAGLTPRRNLQRNLKVLGAKKITFLRNSRRATPTSKGSLRRKYLRVNIRKLIWTKQRSFLSLFPKLRATEQMTNVGCLLKKSSQLRRSWRNVSRISNMEHRLTMDSALSLTKREGPETSEKKRKLP

SEQ ID NO: 1162 - protein, 1507 aa, Artificial Sequence
  Assembled poly-FSP polypeptide 4D
NRKTRKAAREKHRKTDDKKKKSTEKTKNAKKMPFQQRPPLQPVNLDLQHQRRRKKKKDKVEIRNRSPKANSTECQGEHSREQNLLNLVQLNPHSPHHRKDEEDHQKRHHHHNQKKMSVRASVSFWTLLPTTGVRTRGSPLRLTLWPPRVPPSPPLALGPRMQLCTQLARFFPITPPVWHILGPQRHTPQAPLRLWSWCGTSQTYFGSRPSPCLSWSSRIVAPGHALSCRTRRRWSSKRWIFSNQLTVQMLCLPITHPFASQPLGQEMPNNTQIRLLKPCRVNAVEELHSRRMSVRIVKNWVSCCYVRLSAVGLSTWSALDEEKKNGRISSLKKKVNACSSLILSFQRVKTGMEILLWILLKMEIQIFKICLGEMQLCGQAFGSFSADFSAPQIIKKMKKRIMVHELKKNLLLPMCSSLALPTGLTSLILPSSDLAVLISSSTSHFLMRSPVLPSSRLTCASPQLPRMWTWSSWLKNEGNNHWPRVEMPTGWLLVGYNTRNTAQNPRLQQHLKHWQQCTRARWCQEPCQTLTFFHFFFFFKTVSLCCPGWSKGQPPPPGLKPSSLASQVARTTGVYQHVWLICFVFFVCVETGFCHVAQVGLERLVSLSGITDVNHWAQPKPSPSKGTGMNRPIGLRVGKGVWARLILAMTLTLNGMAKKSQQPLQVVLRLGNLPPFFRGSEVPFPRPCRTKPACTSKAWTPRKLVGRAVRRKGSPLWDCSTTTGTHHGCLWEIPSVTLLAHPRTASITLPTTSLKGSRTSCCPRSHPRLPRTKWPLQCLLHSLGTTGTLVWERGVLQMRSLEAHCPLQTFHLHHCRTQPSSCPPAWILYQGQWSGAVVGLRPVAHHLPRPIQGLHCPQAPHQPALSWGKWPVGMTGPARCCRWPRRCQKKVPSASPWGLVLKKNRKQMLNQKCLAPFRESTLGNFWMKLLQLPVVINLKRLQKFNLHLCYYHSQSNRNKSRQMESLGMKLQSQKSQHHCALRKIEWATKLSLGGKAGPQAQEKATSRILNLQVLKKILRSFMKLYHSLVMCLRLRTKLEKALSALFIWPQHSYKPLFFHGDLCEWGGQAHRQRNWLKNWKRFKLKKKYIQKKKQKSNKIICKGHRITIICIKNMFLQRKGFLNLSHVEKFCRGGPSASDRCCSCSPSGFSAGRGRCPVQGCLRPHRVQLLRRWGPGSPAGQRLSKGFQLLRWWGPGSPAPEPRKGPFPPPDPPWPVTAVTVMAGSVPSAQSVDALESPGPLALEGPSSPRNLLWREMSIFLPGIFTAKKSPTSFCCNILNSLPSSMEIAVLQEDSKKMTQKGQAFGSLCQLVSADFSAPQVTRLRSLNHLLITYTPHICRHTLLTPDTRWIFSNQLQTVQMLCLPPLKQGERIIWPLGGFQIPNFFWSLGIGHTGAWWHTGRRRREWGGSTVSRSPLWISSMIYLRGMAFASDSSIRTTRVSWCRRCGAKSAAASSIEALTALFTCRTASISVNISTLMSILEALKKKPRDICRISCRCRREYRVTM

SEQ ID NO: 1163 - DNA, 4521 bp, Artificial Sequence
  polynucleotide 1C
agcaccagacgggaaatgccttctcaggccacaccttctccacctggaccttggagagccgctctgggcaaagaagtgaagcggagccagagcaagctgcggctgagaaacacaagccccaccgagatccaattgaccatgaacgacagcaagcacaagctggaaagccccgctctgaaacaggtgtcccctgcctctccacctacacagcagcctcagacaccccaggatagcagacaggtgctggccgcttcttctcctggacatcctcttggccctggcgactgccctagaacaatggctggaccttctgcctctctgcacccagcatctggcagagccagcagaaagacctggcagagaaggctgagagcctgtagagctggtggacctgctggatgggctagacaggccatgacactgaaggccctggtcaagacctggacacagttcagaaactaccccagagtcggagccggaacaggcggaggacctgcttgtgttcctgtggccgaagcttctactggcgcctggacagctgaaggcgctgccggaacaagatgcagagcttctagagccccttgcagacagctgcctgccagctctcctaccaagtgcgagatctgcgtgaagagaaggcggcggagaaagcggagcagccagtctagatctcccgtgcctaagaaacgcgagcggatgatgctgcctgtgcgggccagaacagctagatctgctctgccacaaggcagagcccctctggaaggaatgcttctgcctagagcactgcccagcctgctgagcagaatgccagccagaagagagagccggttttggctggcactgcaggctctgggactcagacctcctcatctgcctagctgtcaccctctgcctcaactgcttggacctcctccacctcatcaggcccctttcgacaagaaaggcttcgtgatcctgagcaagggcaagaagcgccggaaagaaatccggcggatgaccagacggaccatgaccaccaccaaaatgatgatgatgcggcggaccaagcggcggaggcgaaaacgtagaagaatgaccatgatgacccgcagaaccctgctgaccaagaaaacctgtctgacccctagaaccagcgccgccacaaaagctctgcccagacagacaatcagccagcggaggcctatccagacacctcctggaacaagcctggccatctggggcagactgcctctcagaccacagagaggacctcggcctctgcatagatggctgcagcagacaacaggctgctcccagagaagaatcgccaagaagcggatcaagctgaggcggaacacactggccatccggtttatctctgcccctcagcctagcagcagcaccgttacagctgctcctagcggccagtacttcagcagcttcttctacaccagcgaccggaccaagtgtgaaatctgtgtcaagaacaccgccatcctggctatcaccctgatcacccctcaggaccctcacctggaccctgtgtgtcacccacatagaaggcctggctggaagggccaccacagagtggtgtttagccaccatccaagcggctccaccaagagccattggcagcagagagaaagaggcggaggccgcagagaaaaaaagggctgcagagagatgcccagcagctggtctagctctggcagaaccgccgacaaaaagaacgtgcggagcagaaccagactgaccctgacaggcacaagaagcagcggcacaagagcctctccaagcgccgtgtgtctgtgctgttggacatgcccctccagaagcttccctgccgcatctccatctggactgagagcacctgttggagcccaggctcctcctgaagtgacactgagagccagctgtgcctctagcgcctctaaagcctgtgctggactttggccttggggagcccaagtgcggaacaaagtgcggcagaacttcaagcggaacctggccaaaaagaccctgactaacgccctgcggagtatgcccaagagcagaaaccaggtgctgttcagacggaatctgaccccaagccagctgagaactctggcccctccttacatgctgctgccccagtctctgtctcagagcctgtccagaaagcagatccccagccaatcaatgctcgtgaccgccttcttcctgctcgacatcatcctgagaagcctgctgtactcccggatgtgcctggtgcagatccctacacacacctgggagcccgactacttcgtgtccctgcctatgatgttcagctgggccactcagagctttccagtgggagccgtgttcctgaccagacctgccattccttgctgcagctgtaccagccacagcaacccttggagccagtccttcaagaagaagaagcccctgacattcagccccagcgtgccaatgtctctggcctgtagcatcaccgtgtccttcgtgggccagatcagcacactggtgctggacgtgtcctccatctctcactggcgcaagcgcaagagagagaagcggtcccagaagtcccggcagaaccatctgcagctgaagtcctgcagacggaagatcagcaactggtccaagctgagatccccgtggatcttctaccctcggctgaaaaccttcggcgtgccactgggctctatcctgtgtctggcaggctccctgagcacgatgatgatcattagcaccaccagacaagagtgtggcagacgggcctccgtgccttgtagacctatgatcggcagcgctagacccggaccttggcggacatctgctatgccatctgccatgggagtcgccctgcctaccagctgtgaaagcggaagatctcctcctgccaccggcggaagaatgcctggatctcagtctatcatgatgagctggatgcctccactggctccctgtgccgcttgtccttgttctcctgctcctacactgtgccctgctcatcctgcaagagcccctacagccgtgcctgcctttacacctctgtctgctcaccctgtgccagtgctgtctggatgtcacctggccgtgcgcacctctatgctgacactgctgcccatgagacaccctcacagaagcccacctacaagctgccctccactgctggaagctttcccactgccaagggccagcctgagagctaccgtgcctagacacagctctgtgctggccactggactgcatctgcatcggcagattagcctgcctctgaggggcttcctgctgcatcaacctctgcctggacaacacctgtggctgtcccacagactgaggctgagactgccaagaacaggcgagaagaacgacctccagctgttcgtgatgagcgacaccacatacaagatctactggacagtgatcctgctgaacccctgcggcaacctgcacctgaaaaccacatctctgcggagagccagacctacctcctgcagcacatgcagaatgtggtggctgaagctggccccactgcaagtgaccacaacactgaagctgatcctggtcatgctggaaatcgtgaccgaagaggccaagaaatccatgaagagatcccggcggagcaagatcgaggcctctcctatcggctccatcatgaagaagaaagacagcaccatcttcatcaaccagcagctcaagtggacccctcacatcctgaagtctgccagcgtgtccaagaagagactgcccaagctgaacggcatctgggaagtgatgccccggacactggaaggctgcatcagcgtgaaggaccaccggacaagccagaaccacagcaagtgcatcaccgagtgtgtgcggacagccctgaaccagagaaaggtggtcaagaaccccagccagccagtgccactgagaaacgacggcatcaccaacggcaacgactccaccagatcctgctccatcagcctgaagaaaagcctggaaaagatgcccctgatgaacgccaagaaaatggaagatatgatctgggagagcaacatgggcggcaaccggtccatctgcctgacaagactgccctgcaaagtgaccgagtccagccaaagaccacctcggagcattctgtccctggcctctagagccggacagtttcccgtttggcggagaaccagcagaggcatgtccctgcagtggaagtccggcaatgcctgcacacctctgaggtgccctagcagaagccctgccacatttctgaccgcactgaacggctggcacagatctggacttagggctcagcaacctagcctgccaggaccttgtgctagcctgctgtctacactgagccagcctccaccacaggctccaagccaagtttggacagccgccacactgagatgtcccgctgttcctgcagctgcttgccctcctatcgtgttctttctggccccatacttccccacaccactgagcatcagcagacccacctctcgggccagacagtcttgttgtctccccggactgacacaccctgctcaccagcctcttggctctatg

SEQ ID NO: 1164 - DNA, 4503 bp, Artificial Sequence
  polynucleotide 2C
cggcagatcaacagacggaagctgcagagaaagaagcgccggaagaagagagaggaccactgcggactgcgggccagaaaccggaacatgaagaaaaccatgagccacctgatcgcccatcaggccctgaagatgtctggcctgagactgtttcaccccagactgctgacacggaagaagcctggcaagaaccctcggagaaagacctggaagatgcggaagaagtacgcccagaagcctagccagaagaaccacctgtacggcaagggcctgacacaccctgtgcctctgaagagaaccctgcagaacaagcggaacaagaacatcaagcgcgtgaaccagaagaagggcaacatcaagagaaagagcatcctgctgcacctcatcgtgctgaacagccccgagagcaacctgcaggctcatcctcaagttccagcactggctcctcaggcttggtggcctgctagaagaggccctctgacaagcgctccatctgctcagcagagcctgaccttcctgcctagcagatttccttggggccctcctccactgcactggaactctgcctacctgggcagaacactgctcgtgacctgcatcctgtaccacagatggatcgtgaccagcatgtgccagagccagagatggctgaccagcaccacctctagaagcagcgccctgatgtggacccagtggtctagcgtgacaagcctggaatggacagcccaagagaggggctgtagcagctggctgatgaagcagacctggatgaagtcttggagcctgcgggaccccagctacagatccatcctggaatacgtgtccaccagagtgctgtggatgcccacatctacagtgggagccctgagagccacagctcctgcaacagctgctccacaggctcagacccctcattggagagccgccacaacaagcagcatgagcagcagccctagagccgagcctacaagctctagctcttgggccacctgttggcccagatgttgcagctccagctgttactggtccctgtcctcttggcctcctgctggtgctgccgaggccacaaataccaggaccagaagcagagagtcccagcggggcagaatgctgacttggagaagcagcctgtggctgcagggcaccagatgttttacaggcgtgcggacctccagcagacacccttcttggccttggaccagatgcctgagaatgcggcctcctagaagcaacagccggaaaaagctgctcgaggacatgaagcaaaatggcttcacccggtacaagaaacggggcgtgatagcctggcggagagccactttcctgctggccctttgggagtgcagtctgccccaagctagactgtgcctgatcgtgtctaggaccctgctgctggtccagagcagatgcagcctgatggaacagatccctcacctgaagtcctggtggtgtacaagaggcggcggaaagcggaagaaaaagatgtgcaaggtgtccggcggctgcaccgcctgtgttgaaagatgtccttggaagggcatctgctggaagtggcctgtgacagtggccgctctgatcctgattcagcacggcggcatcttcaccttccggttctgggtcgagaagctgtcctggaacatctgcaagaatctgtccctgtacctggacaagttcgtgcagcggctgctgtacgtgtacatcatcgagacaaacgtgttcgtcctgaacctgttccacgtgccagtgaatcagatcttcatgatggccttctacctgaagtacaccgagaaggcctgggtcatggaactggaatggctcattcagcagcagtgctaccagttgctgctggctcatatgtacggcttcagcacctacggcacccagaaaggcgagtgcgtgtgtctgcagtgtctgagcggcagctccctgttcatcctgaagcagccactggacctgaagatcagcaagaccttcatgagcagatcccacctggatttcagcccctattggatgaagaaagtgaaggcctctccacagatcatgcagcggatgagcgccgtgaacttcgagacaatcaggcggaagtggcagatccggcacgtgctgaagaacctgcctctggaaaacacacagatccccaggacaagccctctgtggaagatcacaatggtgctgacataccccaactgcgtggtgcatgtgctgatgttcgtgctgttcaaggccgaccagagcgagtctagcctgagcagcggaatctaccctcctagcacctgtagcctgccttgccggggcattagaatgtgcgccctgtctcaccctagcttctacatcagcagcaccgtgtgctttctgagcaagcactgcatgaccgcctgcaccagagagaagatcatcaaccccaccatcagctgcccctttcagagccccacaaagagactgggccacagagagggcagcgagagcgataatctgggcctgctgtactcctttcctccttggctgcccatgagatccctgggcgaaccttggagagctggctttcagtggggagagtccccttggcaagtgatggctagcctgaccggcaacagcgtgatcgtgcacaagatcgtgctggtgtttctgaagtctctgagcagctacaactgcgagcggcggatctctggcatccagaagagagccatcgagttcgccgtcctgaagctgctgaacatggacctggctagccctcagattatgcagagaaccagcgccgaccggttccggatgaagcggagaatgcagaacctggataacctgggcgtgccctggccattgcttccaggtgctgctcctccacatagactgctgggcccctctagatggattctgtttcatgtgcggaacatcgtgtacggcatccaagtgatgctgtgccggcggagaaacagcagaaagcagagtcaggtgcagctggccattcaggtcctgctcgtggacaagcacaagtactttctgttcggcccctatcctatcagcgagggactgaccatgaccaccggccggaacatcaacagcaactccctgatgaccaactgcctgttcagccccatcttcctgtgccaccacgccatcatgcaccggaagatgacaagcccacacttcagactgttctccagcaagatcccacatcctcaggtgccaagtgtggtggccctgtgcaagttcctggccaatggcctgtggttcaacctgatctttcagaaaaagggccacatgatctttagccccaagttcttcctgacctttagccagcggaccctggaatccgccggactgtttccatggctgcacacccagtgccggaacaaaaagaccaagctgtggttttccctgatcaacatccaccaccgcaagaatcctctgctgcctatgagaatgagcagaacacctcctcggagagtgtgcggatctccacctctgcatctgtgccaacctctgagaggcggcaagaagagaagcaagttcgccttctggaagcctcctagccagggcatcagctcttgtctgatgacaggctgttggggctcctgtggcagagcttgttcttgcggaagaggctgcggtacacccagaggcgactggaaaagacacccacctcgcagagagctgagcctggaaccatggattccttatctgcaccagcaaaagacccagcggaagcggatgaagaccggcgccattcaagagaagggcgctatccaagaaaaaggcgcaatgaccaagcggatctgcgtggtcaatttcgaggcctgcagagagatggaaagcctgagcgcccctgagaagattaccctgttcgaagcccacatggcccggtgcacctccatcaatgtgctgtgtgtccgggccagcctgattgagaagctgatgaaagaaaagcgcaagatgaagcgcaaccaggtggcatcccctcaaatcatgcaacggctgttcatcaagggctaccagaacaaccacttcacgttccacctccaaaactttgccttcttcagctccttcggcaacaacaagtatatcaacattctcacccgggccttcatccacacacctagaagccctggctgttccgtgtacgccaatatgtgctggcggaagatgcagtccctgaatcaccccagcagactgaccaactgtcaccccgcttggctgagccccattagtgcttgtcctaggctgctgccctatccttttcacgtgctggcactggaagtgacctttccacctggcacagccatgcctcagatgcaattgcaggcactggctatgtgggagaaaggctgggacaagcaagagaagaaatcccgcaagctgatgtcctcctgcctggaaaaaaaggctacctggatgcggagaacccctggcacaagcctgcagtgttacctgaacacacacccctgcaccatgctgctgcctcagggaatcccatctctgaacgcccagtggatgttcctgcggatc

SEQ ID NO: 1165 - DNA, 4518 bp, Artificial Sequence
  polynucleotide 3C
cctattcctccacacctgagacaccctctgctgctgaagaacaagaagcggagaaagctgcggcccaagagcagaaagaagggccacaccaagaaccggcggaaggccaagagaaagccccagatcagaaacagccgcagagccacacctaccagcaagggcagcctgagaagaaagtacctgagagtgggagccgccgctgctagctgtcaatctcctccatctcctagagagacaacccctagcagcgacgccaccagaagaaccagacctatcgccgctcagagcaagaaaaccatgacagccgccggactgacccctagccagaagaaagatcctgccggcaagctgaagaaacaggtgtccgtgtacagcggcaacctgctgagcttctctcggagaggcatgaagtctagcgtgcgcctgaagaactgcaccaacctgagcgtgcccatgatgctgaccatcctgatctggaagcgggtgttcatcctgctgctgtccgacaagaaatctatccctcacgtgcccaaggccaccgccgctcattctgtgacagtgaagctgcagagccggcggaacagacggtacagaaagatctatggcgagctgaagatgtccctgcaggccagcaatggcatggaagcctgtggcacacaccccacacctagactgtccgtgtccgtgatcaccatgaagctgtgggagaagcacttcaagggcctgaactggaacctggtcgtgtggattctgaacctgaagatgatgctcaagaagaagtatctggtccagcgcgagtgggagaaacggaagcagattcttggcggcggaggcaagtacaaagagtacttcctgaagagaatcctcatccgcaaggccatgacagtgctggccggcgataagaaaggcctgggcagattcatgagatgcgtgcagagcgagacaaaggccgtcagtctgcagctgcctctgggcagaatggacctggatggaatgctgaccgtgatcggccagggactcgtgggcatgacacctagagatctgggaacagtggctggcgccaccgcacagattcagaggcctattcaggtgcagacaggcggcagactgagaggccctagaagaaaggtgctgatggtgctgtggctgcccgccaatcagagcctgcagaaaagccaggtgttccagtgggtgctgagaaccgagctgcccctgacctttagcaccctgctgtgggacagcagacacgacctgcctagaatgctgcccatcagcagccctctgcacagaccccagatgcctttctggacctgcacctttcctgccaccacatggggcacatgggagacaccttctacatggggctggcggacctttgccagacagccttctagacccaccggcagaacccctaccaccagactgatggctccagtgggcagcgtgatgagctgtagcctgctgacacagccatctccagccagcgcctgtacaatgcctccactgctgcatcctcagtgggcccctcattctgctggactttctccaggcgcttgcagacctgcctgtacctgcatcagcatgaccacaatcagcagggccacctggcgcagaaacctgcagagaaacctgaaagtgctgcggctgagaatccccagcctgcggaagtacagacagcagaacacccggtccaccaacctcgagaagaacccatctctgaagaagcagagccagaggcggggcaagctgtctctgaccacactgagcttcgtgctgatcgaggaactgctgaaaaagagcagccagctgcggagaagctggcggaacgtgtccagaatcagcaacatccggaagctgatttggaccaagcagcggagcttcctgtctctgttccccaagctgagagccaccgagcagatgaccaatgtgggctgtagactggattttcaccccagaagcagctccggcgacagagtgttcctggtcaagatccagagcagcccattcctggccagatcctggaataccatgcagtggaacaacaagaaaatggccatgactgtgatcgctggcgcccaccactgtcagtacaagctgacctacaccaaagtgtggaagatgaattggaagaaaatgatgatcggcagccagcacctcctgttctccccactggatagctctccactccagctgctgctgcacccacacggcaagagatgcaacccctgttgtcggctgacatggatgagccacctgaatcggaagctgcacctcaccaggtcctgcctgatcgacctgaccatgatgatgagccagaaactgtggaagaatcagcggaagcgcatccctctgccttctccaagacagcatctgctgcctcagtatcctctgcaccctcctccaccttgtctgctgcttctccaccatagacaccacctggcattcctcgagatggcctgtagctctcagcacacccacagcatcaagatctggatcagcttcagccacgagacaatgagcctgtccaacatcctgatgaagttccggctgaccaccaccacaagcagccccagaagaagccctgctctgcgagctagaggcggcacaacaatcggcgaagtgaccagcagcctgttctttagccactgcctgtgcgtggcccctagatgtcctagatctgccgtggacatcagccccggacctacatctccttctctggcctcttgtgcctctgtggccattggaaagctggcactgcttggcgcctctgctccttgtggtgctgctggcgctagagaggccggaagatttgctgtgctgggcaccatggtcatgaagaacatggaacacagactgaccatggacagcgccctgagcctgacaaagagagagggccctgaaacaggccccgtgtactacgtgtgcaaccggatgaatgtgtccagcgtgctgaagcctttcctgttcaccgtgcctatcgaggacatgagagagtgcaccctgggacgcaacagaatgaatgtctcttccgtgctgaaaccctgtctgatccccgtgccaatctgcaagaagaaactgctgctcaagctgctgaggggcgcctccagctctaccagcagagatagcagaagctttttcaccagcgctcaccccagcagaccctgcaggatgagactgtaccagatgctgcagaagcagtgctgctacaacctcgtgatcaagcaccctctgatcttccggatcaacctgcggagacagggcaagaccaaagacggcgttgtgcagagcctgggcttcctgaaccagcagatcatcctccagaaagagttcttcatctgcctgctgatgttcatcaagcggtggaagccagccgccaccaagaagggcaagaacagcccctgctgccagaaaaaactgcgggtgcagaaccagggccatctgctgatgattctgctgcacaacagaggcccacctctgcataccagattcgagaaaaagcggcccgagtggctgagcagaaaatccggcgtgatgaagtgctgggatctgtgccctgccttcagcggcaggattctgcaccagccagaaatggccgccatgagactgatgcccaagttcctgaactccaccaacagctggtggacagtgcacaagaagagaggcctgttccaccagatgaagtgtctgaccgccgtggactgtctgcaggccttctgggatatgagcgagaagaaacgcaagctgcctatgattcgcaaaatccagaagcggcggagaaccgccaaccggaacatcgagatcacccctcagagaagcaaagcccacctgaagaaaacctccgccaagggcgccaagaaaatcaccttcctgtgcctgagagtcagatgcggaggctggctgtgtggctggacaccaagaggatggctgaagaagtccaccaagtccagactgtgcttcttctacctgctgtactacctgtttttcctgaccgtgtgcggcttcacccctccaccacttattctgtggcctcaggcagcccctggcgagaagctgaagcactgttttaaagcctggggcgtcgaccctcctggcagcgtttggattctgccctgcttcctgattcacctgagaaaggtggacacccaccacctccaggtggtcaccaaaacagtgaccgccacaacagccgacggccagaggatgagaaggctgaagtgcaaggcctgccggctgagatgggctagacctgaacctgcagctcaggcccctcctaagagccactttccacctcatcctagcggcccctccagaaccagctctctgcaattgagaacctacatggaaatgcactacggccatcaggccccacaggtggcaatgctgcctaaactgctgtgtcggcagatgctccccactctgtctaccctgcagcagagacatcctcagggcccatgtcctcctccagtgacacctctgagagtgcagtctgtgctgctgctcggagtgcctcaaacagct

SEQ ID NO: 1166 - DNA, 4521 bp, Artificial Sequence
  polynucleotide 4C
gacagcaagaagatgacccagaagaaccgcaagacccggaaggccgccagagagaagcacagaaagaccgacaacctggacctgcagcaccagcgcagacgcaaaaagaagaaggacaaggtcgagatccggaatcggagccctaaggccaatagcaccgagtgtcagggcgagcacagcagagagcagaacctgctgaacctggtgcaattgaaccctcacagccctcaccaccggaaggacgaggaagatcaccagaagagacaccaccaccacaatcaaaagaagatgtccgtcaacgagggcaacaaccactggcctagagtggaaatgcctaccggctggctgctcgtgggctacaacaccagaaacacagcccagaatcctcggctgcagcagcacctgaaacactggcagcagtgcaccagagccagatggtgtcaagagccctgtcagaccctgaccttcttccacttcttcttctttttcaaaacggtgtccctgtgctgccccggctggtctaaaggacaacctcctccacctggcctgaagccttctagcctggcttctcaggtggccagaaccacaggcgtgtaccagcacgtgtggctgatctgcttcgtgtttttcgtgtgcgtggaaaccggcttctgtcacgtggcccaagtgggactcgagagactcgttagcctgagcggcatcaccgacgtgaaccattgggcccagcctaagccatctcctagcaaaggcaccggcatgaacagacccatcggcctgagagttggcaaaggcgtgtgggctagactgtggctgaagaactggaagcggttcaagctcaaaaagaaatacacaggcatggaaatcctgctgtggattctgctgaagatggaaattcagatcttcaagatttgcctgggcgagatgcagctgtgcctcaagaagaaagtcaacgcctgcagcaacgccaagaaaatgcccttccagtgccggtgcagacgcgagtacagagtgaccatgattcagaagaagaaacagaagtccccgctgttcttccacggcgacctgtgcagaccttctccttgcctgtcttggagcagcaggatcgtggctcctggacacgccctgagctgtcggactcgtagaagatggtccagcaagatggccaagaagtcccagcagcctctgtgtagaggcggcccttctgccagcgatagatgctgtagctgtagccccagcggctttagcgctggaagaggcagatgtcctgtgcagggatgtctgaggccacacagagttcagctgctgagaagatggggccctggatctcctgctggccagagactgtctaagggcttccaactgctgcgttggtggggaccaggatctccagctcctgagcctagaaagggcccatttccaccacctgatcctccatggcctgtgaccgctgtgacagtgatggctggctctgtgcctagcgctcagtctgtggatgctctggaatcccctggacctctggctctcgaaggccctagcagccctagaaacctgctctggcgggaaatgagcatcttcctgcctggcatcttcaacctgcacctgtgctactaccacagccagagcaaccggaacaagagccggcagatggaatccctgggcatgaagctgcagatcacacacccattcgccagccagccactgggccaagagatgcccaacaacacccagatcagactgctgaagcccggccaggcctttggcagcttttccgccgatttttcagcccctcagcaggcccctctgagactgtggtcttggtgcggcacaagccagacctacttcggctctatcgaagccctgacagccctgttcacctgtagaaccgccagcatcagcgtgaacatcagcaccctgatgagcatcctggaagccatcctggccatgacactgaccctgaatggcagccctctgtgggactgcagcacaacaacaggcacacaccacggctgcctgtgggagatcccttctgttaccctgctggctaccgccaaaaagagccctaccagcttctgctgtcagcggcctcctctgcagccagtggaagagaagaagaacggccggatcagcagcgtgccaccttctccacctcttgctctgggccctagaatgcagctctgcacccagctggcccggttcttccctattacacctcctgtgtggcacatcctgggacctcagagacacacccctctgctgacccctgacaccagatggatcttctccaaccagctgcagaccgtgcagatgctgtgtctgcctccactgaagcagggcgagagaatcatctggcctctcggcggctttcagatccccaacttcttttggagcctcggcatcggacacactggcgcctggtggcatactggaaggcggagaagagaatggggcggcagcaccgtgtctagaagcccactgtggatcagctccatgatctacctgagaggcatggccttcgcctccgacagcagcatcagaaccaccagagtgtcctggtgtcggagatgtggcgccaaaagcgccgcagccagcagcgacaagaagaagaaaagcaccgaaaagaccaagaacaagatcatctgcaagggccacagaatcacccaggtggtgctgagactgggcaacctgcctccattcttcagaggcagcgaggtgccctttcctagaccttgccggaccaagtgccagaagaaggttccaagcgcctctccttggggactgcacccaagaacagcctccatcacactgcctaccaccagcctgaagggcagcagaacaagctgctgccccagatctcaccccagactgcccagaacaaagtggcctctgcagtgcctgctgcacagcctgggaacaactggaacactcgtgtgggaaaggggcgtgctgcagatgagaagtctggaagctcactgccctctgcagacattccacctccaccactgcagaacccagcctagctcttgtcctccagcctggattctgtaccaaggacagtggagcggagccgtcgtgggacttagacctgtggctcaccatctgccaagacctatccaggggctgcactgtcctcaggctcctcatcaaccagctctgtcctggggaaagtggcccgtgggaatgacaggacccgccagatgttgccggtggcctagaagaatgtgtagctctctggccctgccaaccggcctgacatctctgatcctgcctagcagtgatctggccgtgctgatctctagctccaccagccactttctgatgcggagcccagtgctgccaagcagcagactgacatgtgcctctccacagctgcctcggatgtggacatggtctagctggctgaaagagtggggaggacaggcccacagacagcggaactgtagagtgaacgccgttgaggaactgcacagcaggcggatgtctgtgcggatcgtgaagaattgggtgtcctgctgttacgtgcggctgagtgcagtgggactgtctacttggagcgccctggattccctgatcctgtccttccagagagtgaaaaccagccggatactgaacctccaggtgctgaagaagatcctgcggagctttatgaagctgtaccactctctcgtgatgtgcctgcggctgcggaccaagctggaaaaagctctgagcgctctgtttatctggccccagcacagctacaaaggccaggcattcggaagcctgtgccagctggtgtctgccgatttcagcgcccctcaagtgaccagactgcggagcctgaaccatctgctgattcggtggatctttagcaatcagctgacagtccaaatgctctgcctgccgatcatcaagaaaatgaagaaacggatcatggtgcacgtcttgaagaagaatcggaagcagattatctgtatcaagaatatgttcctgcagcggaagggattcctgaacctgagccacgtggaaaagttcagagagagcaccctgggcaatttctggatgaagctcctgcagctgccaccagcttgcacctctaaggcctggacacccagaaagcttgtggggagagccgtgcggagaaagggcgtcgtgatcaacctgaagagactgcagaaattccgggctagcgtgtccttctggactctgctgcctacaacaggcgtgcggacaagaggctctccactgagactgactctgtggcctccaagaagccagaaaagccagcaccactgcgccctgagaaagatcgagtgggccacaaagctgtccctcggcggcaaagcaggaccacaggctcaagagaaggccaacatcctgaacagcctgccttcctctatggaaatcgccgtgctgcaagaaatgctgaaccagaagtgtctggcccctttcgagcttaagaagaacctcctgctgccaacctacacaccccacatctgtcggcacacccttaaaaagaagcccagagacatctgcagaatcagc

SEQ ID NO: 1167 - DNA, 4521 bp, Artificial Sequence
  polynucleotide 1D
gccgacaagaaaaacgtgcggagcgctagttctcctggacatcctcttggccccagaagaatgaccagacggaccatgaccaccaccaaaatgatgatgatgcggcggaccaagcggcggagaagaaaaagacgccggatgaccatgatgaccagaagaaccctgctgaccaagaaaacctgtctgacccctagaaccagcgccgccacaaaagctctgcccagacagacaatcagccagcggaggcctatccagacacctcctggaacaagcctggccatctggggcagaagaagcaagatcgaggcctctcctatcggcagcatcacccctctgagcatcagcagacctaccagcagagccagacagagctgttgcctgcctggactgacacaccctgctcatcagcctctgggctctatggttggagctggaacaggcggaggacctgcttgtgtgcctgtggccgaagcttctacaggcgcttggacagctgaaggcgctgccggcacaagatgtagagccagcagagccccttgcagacagctgcctgcttctagccctaccaagtgcgagatctgcgtgaagagaagaaggcggcgcaagcggagcagccagtctagatctcccgtgcctaagaaacgcgagcggatgatgctccctgtgcgggccagaacagctagatctgctctgccacaaggcagggctcctctggaaggaatgcttctgcctagagcactgcccagcctgctgagcagaatgcctgccagaagagagagcagattctggctggccctgcaggcccttggactcagacctcctcatctgcctagctgtcaccctctgcctcaactgcttggacctcctccacctcatcaggcccctggcgagaaaaacgacctgcagctgttcgtgatgagcgacaccacctacaagatctactggaccgtgatcctgctgaacccctgcggcaacctgcacctgaaaaccaccagcctgaacgccaagaaaatggaagatatgatctgggagagcaaccagcagctgaagtggacccctcacatcctgaagtccgcctctatcgccaagaagcggatcaagctgcggcggaacagcaccagacgggaaatgccttctcaggccacaccttctccacctggaccttggagagccgctctgggcaaagaagtgaagcggagccagagcaagctgagactgagaaacacaagccccttcgacaaaaagggctttgtgatcctgagcaacatgggcggcaaccggtctatctgcctgaccatcgtgttctttctggccccttacttccccatgcctagcagctggtctagcagcggcagaaccagactgcctctgaggccacagagaggccctagacctctgcatagatggctgcagcagaccaccggctgctctcagagaagaggcgactgcccaagaaccatggccggaccatctgcttctctgcaccctgcatctggcagagcctccagaaagacctggcagagaaggctgagagcctgtagagcaggcggacctgctggatgggctagacaggccagaaaacgcaagagagagaagcggtcccagaagtccagacagaaccatctgcagctgaaaagctgcagacggaagatcagcaactggtctaagctgcggagcccctggatcttcgaggccaaaaagagcatgaagagatcccagcggcctcctcggagcatcctgagcctgttcaagaagaagaagcccctgacattcagccccagcgtgtccaagaagaggctgcctaagctgaagggcaagaaacgccggaaagaaatccagcggaaggtggtcaagaaccccagccagcctgtgccactgagaaatgacggcatcaccaacggcaacgacagcacccggtcttgcagcatcagcctgaagaaaagcctggaaaagatgcccctgatgcggagcctgctgtactccagaatgtgcctggtgcagatccccacacacacctgggagcccgactactttgtgtccctgcctatgatgttcagctgggccacacagagctttccagtgggcgccgtgtttctgaccagacctgccattccttgctgtagctgtaccagccactccaatccttggagccagtccacactggccatccggtttatctctgcccctcagccaagcagcagcaccgttacagctgctcctagcggccagtattttgccctgcggagtatgcccaagagccggaaccaggtgctgtttcggagaaatctgaccccaagccagctgcggacactggcccctccatatatgctgctgcctcagtctctgtcccagagcctgtctcggaagcagatcccatctcagtccatgctcgtgcggaccaggctgacactgacaggcactagaagctccggcaccagagcctctccatctgccgtgtgtctgtgctgctggacatgccccagcagaagctttcctgccgcctctccaagcggactgagagcacctgttggagcacaggctcctccagaagtgacactgagagccagctgtgccagctccgccagcaaagcttgtgcaggactttggccttggggagcccaagtgcggatgaagaagaaggacagcaccatcttcatctaccccaggctgaaaaccttcggcgtgccactgggcagcattctgtgtctggctggaagcctgagcacgatgatgatcattagcaccaccagacaagagtgcggcagacgggccagcgtgccctgtagacctatgatcggaagcgccagacctggaccatggcggacaagtgctatgccttctgccatgggagtcgccctgcctaccagctgtgaaagcggaagatctcctcctgccaccggcggaagaatgccaggatctcagtctatcatgatgagctggatgcctccactggctccctgcgctgcttgtccttgttctcctgctcctacactgtgccctgctcaccctgctagagcaccaacagccgtgcctgcctttacacccctgtctgctcatcctgtgccagtgctgtctggatgtcacctggctgtgcggacctccatgcttaccttgctgccaatgatgaccctgaaggccctggtcaagacatggacccagttcagaaactaccccagacggcaccctcacagaagcccaccaacaagctgtcctccactgctcgaggcctttccactgccaagagccagcctgagagctaccgtgcctagacactctagcgtgctggccacaggactgcatctgcataggcagattagcctgcctctgcggggcttcctgctgcatcaaccactgccaggacaacacctgtggctgtcccacagactgagactgcggctgcctagaacaaccgagatccagctgaccatgaacgactccaagcacaagctggaaagccccgctctgaaacaggtgtccccagctagtcctcctacacagcagcctcagacaccccaggattctagacaggtgctggccgtgcctatgagcctggcctgtagcatcaccgtgtccttcgtgggccagatctctaccctggtgctggacgtgtcctccatcagccactggaacggcatctgggaagtgatgcccagaacactggaaggctgcatctccgtgaaggaccaccggacatcccagaaccacagcaagtgcatcaccgagtgtgtgcggacagccctgaacaccaagtgtgaaatttgtgtgaagaacaccgccatcctggctatcaccctgatcaccccacaggaccctcacctggaccctgtgtgtcatccccatagaaggcccggctggaagggacaccacagagtggtgtttagccaccatccttccggcagcaccaagtctcactggcagcagagagaaagaggcggaggccgcagagaaaagaagggctgtagagaggcaagcagagccggccagtttcctgtgtggcggagaacatctagaggcatgtccctgcagtggaagtccggcaatgcctgcacacctctgagatgtcccagcagatctccagccaccttcctgactgccctgaacggctggcatagatctggactgagggcccagaccgccttctttctgctggacatcatcctgcggagagcccggcctacaagctgcagcacatgtagaatgtggtggcggctgccctgcaaagtgaccgaaagctccctggccaagaaaaccctgaccaatcagcctagcttgcccggaccttgtgctagcctgctgtctacactgagccagccaccacctcaggctcctagccaagtttggacagccgctacactgcggtgtcctgctgtgcctgctgctgcatgtccacctctgaagctggctccactgcaagtgaccacaacactgaagctgatcctggtcatgctggaaatcgtgaccgagaacaaagttcggcagaacttcaagcggaactccagcttcttctacaccagcgacaga

SEQ ID NO: 1168 - DNA, 4503 bp, Artificial Sequence
  polynucleotide 2D
cggaagatgcagagcctgaatcaccccagcagactgaccaacaatcctcggagaaagacctggaagatgcggaagaagtacgcccagaagcctagccagaagaaccacctgtaccggcagatcaaccggcgcaagctgcagagaaagaagtccagaagccacctggacttcagcccctactggatgaagaaagtgaagcgggccagaaaccggaacatgaagaaaaccatgagccacctgatcgcccatcaggccctgaagatgtctggcctgagactgtttcaccccagactgctgaccagaaagaagcccggcaagcagaaaaagggccacatgatcttcagccggcggaagtggcagatccggcacgtgctgaagaatctgatccccagcctgaacgcccagtggatgttcctgagaatcgctagcccacagatcatgcagagaaccagcgccgaccggttccggatgaagcggagaatgcagaacctggacaatctgggcgtgccctggcctctgttgcctggattgctgctggcccatatgtacggcttcagcacctacggcacccagaaaggcgagtgcgtgtgtctgcagtgtctgagcggcagcagcctgttcatcctgaagcagcccctggacctgaagatctccaagaccttcatggccagccctcagattatgcagcggatgagcgccgtgaacttcgagacaatcctgcaggcccatcctcaggtgccagctcttgctcctcaagcttggtggcccgctagaagaggccctctgacatctgctccaagcgcacagcagtccctgacacggacactggaaagcgccggactgtttccttggctgcacacccagtgccgggccttcattcacacacctagaagccctggctgcagcgtgtacgccaacatgtgctggcggtacaagaaacggggagtgatcgcctggcggatctaccctcctagcacatgcagcctgccttgcagaggcctgatcctgattcagcacggcggcatcttcaccttccggttctgggtcgagaagctgagctggaacatctgcaagaacctgagcctgtacctggataagttcgtgcagcggctgctgtacgtgtacatcatcgagacaaacgtgttcgtgctgaacctgttccacgtgccagtgaaccagatcttcatgatggccttctacctgaagtacaccgagaaggcctgggtcatggaactggaatggctgatccagcagcagtgctaccagcggaagagaatgaagaccggcgccatccaagagaagggcgctattcaagagaaaggggccatgaccaagcggatctgcgtggtcaatttcgaggcctgcagagagatggaaagcctgagcgcccctgagaagatcaccctgtttgaagcccacatggcccggtgcaccagcatcaatgtgctgtgtgtcagggccagcctgatcgagaaactgatgaaagaaaagcgcaagatgaagcgcaaccaggtggcatcccctcaaatcatgcaacggctgttcatcaagggctaccagaacaaccacttcacgttccacctccaaaacttcgccttcttcagctccttcggcaacaacaagtatatcaacatcctgacctttctgcccagcagattcccttggggacctcctccactgggagcccttagagctacagctcctgctacagctgctccccaggcacagacacctcattggagagccgccaccacaagcagcatgagcagctctccaagagccgagcctaccagctctagctcttgggccacttgctggcctagatgctgcagctccagctgctattggagcctgtctagctggcctcctgctggcgctgccgaagccacaaataccagaaccagaagccgcgagagccagcggggaagaatgctgacttggagaagctccctgtggctgcagggcaccagatgttttacaggcgtgcggaccagctccaggtgcagcctgatggaacagatccctcacctgaagtctaacagccggaagaaactgctcgaggacatgaagcagaacggcttcaccagacggcggaacagcagaaagcagagccaagtgcagctggccatccaggtgctgctggtggacaagcacaagtactttctgttcggcagagccacatttctgctggctctgtgggagtgtagcctgcctcaggctagactgtgcctgatcgtgtctagaaccctgctgctcgtgcagtctagacacccaagctggccttggaccagatgcctgagaatgcggcctccacgcagccactggaactctgcctacctggggagaacactgctcgtgacctgcatcctgtaccacagatggatcgtgaccagcatgtgccagagccagagatggctgacctccaccacctctagaagctctgccctgatgtggacctggtggtgtacaagaggtggcggcaagcggaagaaaaagatgtgcaaggtgtccggcggctgcaccgcctgtgttgaaagatgtccttggaagggcatctgttggaagtggcctgtgacagtggccgccatgagcagaacacctccaagacgcgtgtgcggccacagagagggcagcgagtctgataatctgggcctgctgtactcctttccacctgtgctgttcaaggccgaccagagcgaaagctctctgagcagcggcaacagcgtgatcgtgcacaagatcgtgctggtgttcctgaagtccctgagcagctacaactgcgagagaagaatcagcggcatccagaagagagccatcgagttcgccgtcctgaagctgctgaacatggacctcggcaagggactgacacaccccgtgcctctgaagaggaccctgcagaacaagcggaacaagaacatcaagcgggtcaaccagaagaagggcaacatcaagaggaagtccatcctgctgcatctgattgtgctgaacagccccgagagcaaccgggaaaagatcatcaaccccaccatcagctgcccctttcagagccccacaaagagactgggaagccctcctctgcacctgtgtcagcctctgaggccctatcctatcagcgagggcctgaccatgaccaccggcagaaacatcaacagcaactccctgatgaccaactgcctgttcagccccatcttcctgtgccaccacgccatcatgcaccggaagatgacaagccctcacttcagactgttctccagcaagatcccacatccacaggtcccaagtgtggtggccctgtgcaagtttacacacccctgcaccatgctgctgccccaaggcgctttttggaagcctcctagccagggcatctccagctgtctgatgacaggctgttggcagtggtccagcgtgacaagcctggaatggacagcccaagagagaggctgttcctcctggctgatgaagcaaacatggatgaagtcttggtccctgcgggaccccagctacagatccatcctggaatacgtgtccacacgggtgctgtggatgcccacctctaccgtgcctaagttctttctgaccttcagccagatccggatgtgcgccctgtctcaccctagcttctacatcagctccaccgtgtgctttctgagcaagcactgcatgaccgcctgcacacctggaaccagcctgcagtgttacctgaacctggccaacggcctgtggttcaacctgatcttccggaacaaaaagaccaagctgtggttctccctgattaacatccaccaccgcaagaacccactgctgcccatgcggctggaaaaaaaggccacttggatgcggcggaccgagctgtctctggaaccttggattccttacctgcatcagcagaaaacccagtggctccccatgagaagcctgggcgagccttggcgagctggatttcagtggggagagtctccctggcaagtgatggcctctctgacaggcagacgcaagaaaagagaggatcactgcggactgcaagagaaaaaaagccggaagctgatgtccagctgcgccgctcctccacatagactgctgggacctagcagatggggaagctgtgggagagcctgttcttgtggcagaggctgtggaacccctagaggcgactggaagagacacccacctcggcggattctgtttcacgtgcggaacatcgtgtacggaatccaagtgatgctgtgctgtcaccccgcctggctgtctccaatcagcgcttgtcctcgcctgctgccttatccattccacgttctggccctggaagtgacattccctccaggcactgccatgcctcagatgcaattgcaggcactggcaatgtgggagaaaggctgggacaagcctctggaaaacacacagatccccaggacaagcccactgtggaagatcacaatggtgctgacataccccaactgcgtggtgcacgtcctgatgttcggcggcaagaagcggagcaagttc

SEQ ID NO: 1169 - DNA, 4518 bp, Artificial Sequence
  polynucleotide 3D
cagaacaccagaagcaccaacctggaaaagaaccccagcctgaagaagcagagccagcggagaggaaagctgagcagcagaaagaagggccacaccaagaaccggcggaaggccaagagaaagccccagatcagccagaagaaggaccctgccggcaagctgaagaaacacctgaaccggaagctgcacctgaccagatcctgcctgatcgacctgaccatgatgatgagccagaagctgtggaagaaccagcgcaagagaatccctctgccttctccacggcagcatctgctgcctcagtatccactgcatcctccacctccatgcctgctgctgctccaccacagacaccatctggcctttctcgagatggcctgcagcagccagcacacccacagcatcaagatctggatcagcttcagccacgaggacctgcctagaatgctgcccatcagcagccctctgcacagaccccagatgcctttctggacctgcacctttcctgccaccacatggggcacatgggagacaccttctacatggggctggcggacattcggccctgtgtactacgtgtgcaaccggatgaacgtgtccagcgtgctgaagcctttcctgttcaccgtgcctatcgaggacatgagagagtgcaccctgggcagaaacagaatgaatgtgtcctctgtgctgaaaccctgtctgatccccgtgccaatcctgaccacactgagcttcgtgctgatcgaggaaagccggcggaacagacggtacagaaagatctacggggagctgaagatgtccctgcaggccctgcctctgacctttagcacactgctgtgggacagcagacacaccaccaccacaagcagccccagaagatcccctgctctgagagctagaggcggcaccacaatcggcgaagtgacaagcagaggcgccagcagctctaccagcagagacagcagaagctttttcaccagcgctcaccccagcagaccctgcagaatgagactgtaccagagcaacggcatggaagcctgcggcacacaccctacacctagactgtctagaggccctccactgcacaccagaaccatgagcctgagcaacatcctgatgaagttccggctgatgctgcagaagcagtgctgctacaacctcgtgatcaagcaccctctgatcttccggatcaacctgcggagacagggcaagaccaaagacggcgttgtgcagagcctgggcttcctgaaccagcagatcatcctgcagaaagagttcttcatctgcctgctgatgttcatcaagcggtggaagccagccgccacaaagacacctccaccactgattctgtggcctcaggccgctcctgtgcacaagaagagaggcctgttcagcctgttcttctcccactgcctgtgccaccagatgaagtgcctgaccgccgtggattgtctgcaggccttctgggacatgatgattcgcaagatccagaagcggcggagaaccgccaaccggctgaaaaagaaatacctggtgcagtgtaccaacctgagcgtgcccatgatgctgaccatcctgatctggaagcgggtgttcatcctcctgctgagcgacaagaagtgtctgagagtcagatgcggcggatggctgtgtggctggacacctagaggcaagaacaagaagcggagaaagctgcggcccaagcacctgaagaaaaccagcgccaaggtgtccgtgatcaccatgaagctctgggagaagcacttcaagggcctgaactggaacctggtcgtgtggattctgaacctgaagatgatgtggctcaagaagtccaccaagagcagacagagcagcccattcctggctcggagctggaataccatgcaatggaacaacaagaaaatggccatgaccgtgatcgctggcgcccaccactgtcagtacaagctgacctacaccaaagtgtggaagatgaattggaagaaaatgatgatcggctcccagcacctcctgtttagcccactggattcaagcccactgcagttgctgctgcaccctcacggcaagagatgcaacccttgctgcagactgacctggatgagcagagagtgggaaaagcggaagcagatcctcggcggaggcggcaagtacaaagagtacttcctgaagcggattctcatccggaaggctatgacagtgctggccggcgataagaaaggcctgggaagattcatgagatgcgtgcagagcgagacaaaggccgtgtctctgcagctgcctctcggccgaagaaagtccggcgtgatgaagtgttgggatctgtgccccagactggactttcaccccagatctagctctggcggcgagaagctgaagcactgtttcaaagcctggggcctgtgcttcttctacctgctgtacttcgagaagaaacggcccgagtggctgagcgttgaccctcctggatctgtctggattctgccctgcatggacctggacggaatgctgacagtgatcggccagggactcgtgggcatgacccctagagatctgggaacagtggctggcgccaccgcacagattcagaggcctatccaggtgcagacaggcggcagactgttcctgattcacctgagaaaggtggacacccaccatctgcaggtcgtgaccaagaccgtgacagccacaacagctgacggccagaggatgcggagactgaagtgcaaggcctgtcggctgagatgggccagacctgaacctgctgcacaggctcctccaaagagccactttccacctcatcctagcggcccctccagaacctctagcctgcagctcagacccattcctccacacctgagacacccactgctgctgaagggaaagaacagcccctgctgccaaaagaaactgcgggtgcagaaccagggccatctgctgatgatcctgctgcataacgccagacagcccagcaggcctaccggaagaacccctaccacaagactgatggcccctgtgggcagcgtgatgtcttgtagcctgctgacccagccatctcctgccagcgcatgtacaatgccaccactcctgcatccacagtgggccccacatagtgctggactgtctccaggcgcttgcagacctgcctgtacctgcatcagcatgaccaccatctccagagccacatggcggctgagaatcccaagcctgaggaagtaccggcagaacatcgagatcacccctcagcggtctaaggcccaggtttccgtgtacagcggcaatctgctgagcttctccagacggggcatgaagagtagcgtgcggctgaagaacagcatccctcacgtgccaaaagccaccgccgctcactctgtgacagtgaagctgcagtacctgtttttcctgaccgtgtgcggcttcgaccgggtgttcctggttaagatctgcaagaagaagctgctcctcaagctgctgagaggccccagacggaaagtgctgatggtgctttggctgcccgccaaccagagtctgcagaaaagccaggtgttccagtgggtgctgcggaccgaaacctacatggaaatgcactacggccatcaggcccctcaggtggccatgctgcctaaactgctgtgtagacagatgctccccactctgtccacactccagcagaggcatcctcagggaccttgtcctcctcctgtgacacctctgagagtgcagtctgtgctgctcctgggagtgcctcagacagccgcttttagcggccggattctgcaccagccagaaatggccgccatgagactgatgcccaagttcctgaactccaccaacagctggtggacagtggcccctagatgtcctagaagcgccgtggacattagccccggacctacatctcctagcctggcctcttgtgcctctgtggccattggaaaactggcactgctgggcgcatctgccccttgtggcgcagctggtgctagagaggctggaagatttgccgtgctgggcaccatggttatgaagggtgctgccgcagcctcctgtcagtctcctccatctccaagagagacaacccctagcagcgacgccaccagacggacaagacctattgccgctcagagcaaaaagaccatgactgccgccggactgacccctcggagaaacctgcagagaaatctgaaggtcctgggcgccaagaagatcaccttcctgagaaacagcagacgcgccacacctacctctaagggcagcctgagaagaaagtacctgagagtgaacatccgcaagctcatctggaccaagcagcggagcttcctgtctctgttccccaagctgagagccaccgagcagatgaccaatgtgggatgcctgctcaagaaaagcagccaattgcggcggagctggcgcaatgtgtcccggatcagcaacatggaacacaggctgaccatggacagcgccctgagcctgacaaagagagagggccctgagacaagcgagaagaagaggaagttgcct

SEQ ID NO: 1170 - DNA, 4521 bp, Artificial Sequence
  polynucleotide 4D
aacagaaagaccagaaaggccgccagagagaagcaccgcaagaccgacgacaagaagaagaagtccaccgaaaagaccaagaacgccaagaagatgcccttccagcagcggcctcctctgcagcctgttaacctggatctgcagcaccagcgcagacgcaaaaagaagaaagacaaggtcgaaatccggaatcggagccctaaggccaatagcaccgagtgtcagggcgagcacagcagagagcagaacctgctgaatctggtgcagctgaaccctcacagccctcaccacagaaaggacgaagaggaccaccagaagcggcaccaccaccacaatcaaaagaaaatgagcgtgcgggctagcgtgtccttctggacacttttgccaacaaccggcgtgcggacaagaggctctccactgagactgacactgtggcctccacgggttccaccttctccacctcttgctctgggccccagaatgcagctgtgtacccagctcgcccggttcttccctatcacacctcctgtgtggcacatcctgggacctcagagacacacacctcaggctcctctgaggctgtggtcttggtgcggcacaagccagacctacttcggcagcagaccatctccttgcctgagctggtccagcagaattgtggcccctggacacgccctgagctgtcggactagaagaagatggtctagcaagcggtggatcttctccaaccagctgaccgtgcagatgctgtgcctgccaatcacacacccattcgcctctcagcctctgggacaagagatgcccaacaacacccagatccggctgctgaagccctgcagagtgaacgccgtggaagaactgcacagcaggcggatgtctgtgcggatcgtgaagaactgggtgtcctgctgttacgtgcggctgtctgctgtgggcctgtctacttggagtgccctggacgaggaaaagaagaacggccggatcagcagcctgaaaaagaaagtgaatgcctgcagctccctgatcctgagcttccagcgcgtgaaaaccggcatggaaatcctgctgtggattctgctgaagatggaaattcagatcttcaagatttgcctgggcgagatgcagctctgcggccaggcctttggaagctttagcgccgatttcagcgcccctcagatcattaagaagatgaagaaacggatcatggtgcacgagctgaagaagaatctgctgctgcctatgtgctccagcctggctctgccaacaggcctgacatctctgatcctgcctagcagcgatctggccgtgctgatctctagctccaccagccactttctgatgcggagccctgtgctgccaagcagcagactgacttgtgcctctccacagctgccccggatgtggacttggtctagctggctgaagaacgagggcaacaaccactggcctagagtggaaatgcctaccggctggctgctcgtcggctacaacaccagaaacacagcccagaatcctcggctgcagcagcacctgaaacactggcagcagtgcaccagagccagatggtgtcaagagccctgtcagaccctgaccttcttccatttcttcttctttttcaaaacggtgtccctgtgttgccccggctggtctaaaggacaacctcctccacctggcctgaagccttctagcctggcttctcaggtggccagaaccacaggcgtgtaccagcacgtgtggctgatctgtttcgtgtttttcgtgtgtgtggaaaccggcttctgtcacgtggcccaagtgggactcgagagactggtgtctctgtccggcatcaccgacgtgaaccattgggcccagcctaagccatctcctagcaaaggcaccggcatgaacagacccatcggcctgagagttggcaaaggcgtgtgggccagactgatcctggccatgacactgaccctgaacggcatggccaagaagtcccagcagcctctgcaggtcgtgctgagactgggaaacctgcctccattcttcagaggcagcgaggtgccctttcctagaccttgtcggaccaagcctgcctgcacaagcaaggcctggactcccagaaaactcgtggggagagccgtgcggagaaagggatctccactctgggattgctccaccacaacaggcacacaccacggatgcctgtgggagatcccatctgtgaccctgctggcccatcctagaaccgcctctatcaccctgcctaccacaagcctgaagggctccagaaccagctgctgccctagatctcaccccagactgcctaggaccaaatggcccctgcagtgtctgctgcacagcctgggaacaaccggaacactcgtttgggaaaggggcgtcctgcagatgagatccctcgaagcccattgtccactgcagaccttccatctgcaccactgcaggacccagcctagctcttgtcctcctgcctggattctgtaccaaggacagtggagcggagccgtcgtgggacttagacctgtggctcaccatctgcctagacctatccagggcctgcactgtccacaggcacctcatcaacctgctctgagctggggaaaatggcccgtgggaatgacaggccctgccagatgttgcagatggcccagacggtgccagaagaaggttccatcagcctctccatggggcctcgtgctcaaaaagaaccggaaacagatgctgaaccagaagtgtctggccccttttagagagagcaccctgggcaatttctggatgaagctgctccagctgcctgtcgtgatcaacctgaagagactgcagaagttcaacctgcacctgtgctactaccacagccagagcaacagaaacaagagccgccagatggaatccctgggcatgaagttgcagtcccagaaatcccagcaccactgtgccctgcggaagatcgagtgggccacaaagttgtctctcggcggaaaagccggaccacaggctcaagagaaggccacctctcggattctgaacctgcaagtgctcaagaagatcctgcggagctttatgaagctgtaccactctctggtcatgtgcctgcggctgaggaccaagctggaaaaggctctgagcgccctgttcatctggccccagcacagctacaagcccctgttctttcacggcgacctgtgcgagtggggaggccaggctcatagacagcggaactggctgaaaaactggaagcggttcaagcttaaaaagaagtacatccagaagaagaagcagaagtctaacaagatcatctgcaagggccaccgcatcaccatcatctgtatcaagaatatgttcctgcagcgcaagggcttcctgaacctgagccacgtggaaaagttctgtagaggcggccctagcgccagcgatagatgctgttcttgtagccccagcggcttcagtgccggcagaggaagatgtcctgttcagggctgtctgaggccccacagagttcaactgctgagaagatggggccctggctctcctgctggacagaggctgtctaagggctttcagctgctccgttggtggggaccaggatctcctgctcctgagcctagaaagggcccatttccaccacctgatcctccatggcctgtgaccgctgtgacagtgatggctggatctgtgcctagtgctcagtctgtggacgccctggaatctcctggacctctggctctcgaaggacctagcagccctagaaacctgctttggagagagatgagcatctttctgcccggcatcttcaccgccaagaaaagccccaccagcttttgctgcaatatcctgaacagcctgccaagctctatggaaatcgccgtgctgcaagaggacagcaaaaagatgacccagaagggccaagccttcggctccctgtgtcagcttgtgtccgctgacttctctgcccctcaagtgacccggctgcggagcctgaatcatctgctgatcacctacacaccccacatctgcagacacaccctgctgacccctgacaccagatggatctttagcaatcagctgcagacagtccagatgctctgtctgcctccactgaagcagggcgagagaatcatttggcccctcggcggctttcagatccccaacttcttttggagcctcggcatcggacacactggcgcctggtggcatactggaaggcggagaagagaatggggcggcagcaccgtgtctagaagccctctgtggatcagctccatgatctacctgagaggcatggccttcgccagcgacagcagcatcagaaccaccagagtgtcctggtgcagaagatgcggcgccaaaagcgctgccgccagctctattgaagctctgaccgctctgtttacctgccggaccgccagcatcagcgtgaacatcagcaccctgatgtccatcctggaagcacttaagaagaaacccagagacatctgccgcatcagctgccggtgtagacgcgagtacagagtgactatg

SEQ ID NO: 1171 - protein, 1547 aa, Artificial Sequence
  hTPA- and HA-extended poly-FSP polypeptide 1C
MDAMKRGLCCVLLLCGAVFVSPSQEIHARSTRREMPSQATPSPPGPWRAALGKEVKRSQSKLRLRNTSPTEIQLTMNDSKHKLESPALKQVSPASPPTQQPQTPQDSRQVLAASSPGHPLGPGDCPRTMAGPSASLHPASGRASRKTWQRRLRACRAGGPAGWARQAMTLKALVKTWTQFRNYPRVGAGTGGGPACVPVAEASTGAWTAEGAAGTRCRASRAPCRQLPASSPTKCEICVKRRRRRKRSSQSRSPVPKKRERMMLPVRARTARSALPQGRAPLEGMLLPRALPSLLSRMPARRESRFWLALQALGLRPPHLPSCHPLPQLLGPPPPHQAPFDKKGFVILSKGKKRRKEIRRMTRRTMTTTKMMMMRRTKRRRRKRRRMTMMTRRTLLTKKTCLTPRTSAATKALPRQTISQRRPIQTPPGTSLAIWGRLPLRPQRGPRPLHRWLQQTTGCSQRRIAKKRIKLRRNTLAIRFISAPQPSSSTVTAAPSGQYFSSFFYTSDRTKCEICVKNTAILAITLITPQDPHLDPVCHPHRRPGWKGHHRVVFSHHPSGSTKSHWQQRERGGGRREKKGCREMPSSWSSSGRTADKKNVRSRTRLTLTGTRSSGTRASPSAVCLCCWTCPSRSFPAASPSGLRAPVGAQAPPEVTLRASCASSASKACAGLWPWGAQVRNKVRQNFKRNLAKKTLTNALRSMPKSRNQVLFRRNLTPSQLRTLAPPYMLLPQSLSQSLSRKQIPSQSMLVTAFFLLDIILRSLLYSRMCLVQIPTHTWEPDYFVSLPMMFSWATQSFPVGAVFLTRPAIPCCSCTSHSNPWSQSFKKKKPLTFSPSVPMSLACSITVSFVGQISTLVLDVSSISHWRKRKREKRSQKSRQNHLQLKSCRRKISNWSKLRSPWIFYPRLKTFGVPLGSILCLAGSLSTMMIISTTRQECGRRASVPCRPMIGSARPGPWRTSAMPSAMGVALPTSCESGRSPPATGGRMPGSQSIMMSWMPPLAPCAACPCSPAPTLCPAHPARAPTAVPAFTPLSAHPVPVLSGCHLAVRTSMLTLLPMRHPHRSPPTSCPPLLEAFPLPRASLRATVPRHSSVLATGLHLHRQISLPLRGFLLHQPLPGQHLWLSHRLRLRLPRTGEKNDLQLFVMSDTTYKIYWTVILLNPCGNLHLKTTSLRRARPTSCSTCRMWWLKLAPLQVTTTLKLILVMLEIVTEEAKKSMKRSRRSKIEASPIGSIMKKKDSTIFINQQLKWTPHILKSASVSKKRLPKLNGIWEVMPRTLEGCISVKDHRTSQNHSKCITECVRTALNQRKVVKNPSQPVPLRNDGITNGNDSTRSCSISLKKSLEKMPLMNAKKMEDMIWESNMGGNRSICLTRLPCKVTESSQRPPRSILSLASRAGQFPVWRRTSRGMSLQWKSGNACTPLRCPSRSPATFLTALNGWHRSGLRAQQPSLPGPCASLLSTLSQPPPQAPSQVWTAATLRCPAVPAAACPPIVFFLAPYFPTPLSISRPTSRARQSCCLPGLTHPAHQPLGSMGYPYDVPDYAS

SEQ ID NO: 1172 - protein, 1541 aa, Artificial Sequence
  hTPA- and HA-extended poly-FSP polypeptide 2C
MDAMKRGLCCVLLLCGAVFVSPSQEIHARRQINRRKLQRKKRRKKREDHCGLRARNRNMKKTMSHLIAHQALKMSGLRLFHPRLLTRKKPGKNPRRKTWKMRKKYAQKPSQKNHLYGKGLTHPVPLKRTLQNKRNKNIKRVNQKKGNIKRKSILLHLIVLNSPESNLQAHPQVPALAPQAWWPARRGPLTSAPSAQQSLTFLPSRFPWGPPPLHWNSAYLGRTLLVTCILYHRWIVTSMCQSQRWLTSTTSRSSALMWTQWSSVTSLEWTAQERGCSSWLMKQTWMKSWSLRDPSYRSILEYVSTRVLWMPTSTVGALRATAPATAAPQAQTPHWRAATTSSMSSSPRAEPTSSSSWATCWPRCCSSSCYWSLSSWPPAGAAEATNTRTRSRESQRGRMLTWRSSLWLQGTRCFTGVRTSSRHPSWPWTRCLRMRPPRSNSRKKLLEDMKQNGFTRYKKRGVIAWRRATFLLALWECSLPQARLCLIVSRTLLLVQSRCSLMEQIPHLKSWWCTRGGGKRKKKMCKVSGGCTACVERCPWKGICWKWPVTVAALILIQHGGIFTFRFWVEKLSWNICKNLSLYLDKFVQRLLYVYIIETNVFVLNLFHVPVNQIFMMAFYLKYTEKAWVMELEWLIQQQCYQLLLAHMYGFSTYGTQKGECVCLQCLSGSSLFILKQPLDLKISKTFMSRSHLDFSPYWMKKVKASPQIMQRMSAVNFETIRRKWQIRHVLKNLPLENTQIPRTSPLWKITMVLTYPNCVVHVLMFVLFKADQSESSLSSGIYPPSTCSLPCRGIRMCALSHPSFYISSTVCFLSKHCMTACTREKIINPTISCPFQSPTKRLGHREGSESDNLGLLYSFPPWLPMRSLGEPWRAGFQWGESPWQVMASLTGNSVIVHKIVLVFLKSLSSYNCERRISGIQKRAIEFAVLKLLNMDLASPQIMQRTSADRFRMKRRMQNLDNLGVPWPLLPGAAPPHRLLGPSRWILFHVRNIVYGIQVMLCRRRNSRKQSQVQLAIQVLLVDKHKYFLFGPYPISEGLTMTTGRNINSNSLMTNCLFSPIFLCHHAIMHRKMTSPHFRLFSSKIPHPQVPSVVALCKFLANGLWFNLIFQKKGHMIFSPKFFLTFSQRTLESAGLFPWLHTQCRNKKTKLWFSLINIHHRKNPLLPMRMSRTPPRRVCGSPPLHLCQPLRGGKKRSKFAFWKPPSQGISSCLMTGCWGSCGRACSCGRGCGTPRGDWKRHPPRRELSLEPWIPYLHQQKTQRKRMKTGAIQEKGAIQEKGAMTKRICVVNFEACREMESLSAPEKITLFEAHMARCTSINVLCVRASLIEKLMKEKRKMKRNQVASPQIMQRLFIKGYQNNHFTFHLQNFAFFSSFGNNKYINILTRAFIHTPRSPGCSVYANMCWRKMQSLNHPSRLTNCHPAWLSPISACPRLLPYPFHVLALEVTFPPGTAMPQMQLQALAMWEKGWDKQEKKSRKLMSSCLEKKATWMRRTPGTSLQCYLNTHPCTMLLPQGIPSLNAQWMFLRIGYPYDVPDYAS

SEQ ID NO: 1173 - protein, 1546 aa, Artificial Sequence
  hTPA- and HA-extended poly-FSP polypeptide 3C
MDAMKRGLCCVLLLCGAVFVSPSQEIHARPIPPHLRHPLLLKNKKRRKLRPKSRKKGHTKNRRKAKRKPQIRNSRRATPTSKGSLRRKYLRVGAAAASCQSPPSPRETTPSSDATRRTRPIAAQSKKTMTAAGLTPSQKKDPAGKLKKQVSVYSGNLLSFSRRGMKSSVRLKNCTNLSVPMMLTILIWKRVFILLLSDKKSIPHVPKATAAHSVTVKLQSRRNRRYRKIYGELKMSLQASNGMEACGTHPTPRLSVSVITMKLWEKHFKGLNWNLVVWILNLKMMLKKKYLVQREWEKRKQILGGGGKYKEYFLKRILIRKAMTVLAGDKKGLGRFMRCVQSETKAVSLQLPLGRMDLDGMLTVIGQGLVGMTPRDLGTVAGATAQIQRPIQVQTGGRLRGPRRKVLMVLWLPANQSLQKSQVFQWVLRTELPLTFSTLLWDSRHDLPRMLPISSPLHRPQMPFWTCTFPATTWGTWETPSTWGWRTFARQPSRPTGRTPTTRLMAPVGSVMSCSLLTQPSPASACTMPPLLHPQWAPHSAGLSPGACRPACTCISMTTISRATWRRNLQRNLKVLRLRIPSLRKYRQQNTRSTNLEKNPSLKKQSQRRGKLSLTTLSFVLIEELLKKSSQLRRSWRNVSRISNIRKLIWTKQRSFLSLFPKLRATEQMTNVGCRLDFHPRSSSGDRVFLVKIQSSPFLARSWNTMQWNNKKMAMTVIAGAHHCQYKLTYTKVWKMNWKKMMIGSQHLLFSPLDSSPLQLLLHPHGKRCNPCCRLTWMSHLNRKLHLTRSCLIDLTMMMSQKLWKNQRKRIPLPSPRQHLLPQYPLHPPPPCLLLLHHRHHLAFLEMACSSQHTHSIKIWISFSHETMSLSNILMKFRLTTTTSSPRRSPALRARGGTTIGEVTSSLFFSHCLCVAPRCPRSAVDISPGPTSPSLASCASVAIGKLALLGASAPCGAAGAREAGRFAVLGTMVMKNMEHRLTMDSALSLTKREGPETGPVYYVCNRMNVSSVLKPFLFTVPIEDMRECTLGRNRMNVSSVLKPCLIPVPICKKKLLLKLLRGASSSTSRDSRSFFTSAHPSRPCRMRLYQMLQKQCCYNLVIKHPLIFRINLRRQGKTKDGVVQSLGFLNQQIILQKEFFICLLMFIKRWKPAATKKGKNSPCCQKKLRVQNQGHLLMILLHNRGPPLHTRFEKKRPEWLSRKSGVMKCWDLCPAFSGRILHQPEMAAMRLMPKFLNSTNSWWTVHKKRGLFHQMKCLTAVDCLQAFWDMSEKKRKLPMIRKIQKRRRTANRNIEITPQRSKAHLKKTSAKGAKKITFLCLRVRCGGWLCGWTPRGWLKKSTKSRLCFFYLLYYLFFLTVCGFTPPPLILWPQAAPGEKLKHCFKAWGVDPPGSVWILPCFLIHLRKVDTHHLQVVTKTVTATTADGQRMRRLKCKACRLRWARPEPAAQAPPKSHFPPHPSGPSRTSSLQLRTYMEMHYGHQAPQVAMLPKLLCRQMLPTLSTLQQRHPQGPCPPPVTPLRVQSVLLLGVPQTAGYPYDVPDYAS

SEQ ID NO: 1174 - protein, 1547 aa, Artificial Sequence
  hTPA- and HA-extended poly-FSP polypeptide 4C
MDAMKRGLCCVLLLCGAVFVSPSQEIHARDSKKMTQKNRKTRKAAREKHRKTDNLDLQHQRRRKKKKDKVEIRNRSPKANSTECQGEHSREQNLLNLVQLNPHSPHHRKDEEDHQKRHHHHNQKKMSVNEGNNHWPRVEMPTGWLLVGYNTRNTAQNPRLQQHLKHWQQCTRARWCQEPCQTLTFFHFFFFFKTVSLCCPGWSKGQPPPPGLKPSSLASQVARTTGVYQHVWLICFVFFVCVETGFCHVAQVGLERLVSLSGITDVNHWAQPKPSPSKGTGMNRPIGLRVGKGVWARLWLKNWKRFKLKKKYTGMEILLWILLKMEIQIFKICLGEMQLCLKKKVNACSNAKKMPFQCRCRREYRVTMIQKKKQKSPLFFHGDLCRPSPCLSWSSRIVAPGHALSCRTRRRWSSKMAKKSQQPLCRGGPSASDRCCSCSPSGFSAGRGRCPVQGCLRPHRVQLLRRWGPGSPAGQRLSKGFQLLRWWGPGSPAPEPRKGPFPPPDPPWPVTAVTVMAGSVPSAQSVDALESPGPLALEGPSSPRNLLWREMSIFLPGIFNLHLCYYHSQSNRNKSRQMESLGMKLQITHPFASQPLGQEMPNNTQIRLLKPGQAFGSFSADFSAPQQAPLRLWSWCGTSQTYFGSIEALTALFTCRTASISVNISTLMSILEAILAMTLTLNGSPLWDCSTTTGTHHGCLWEIPSVTLLATAKKSPTSFCCQRPPLQPVEEKKNGRISSVPPSPPLALGPRMQLCTQLARFFPITPPVWHILGPQRHTPLLTPDTRWIFSNQLQTVQMLCLPPLKQGERIIWPLGGFQIPNFFWSLGIGHTGAWWHTGRRRREWGGSTVSRSPLWISSMIYLRGMAFASDSSIRTTRVSWCRRCGAKSAAASSDKKKKSTEKTKNKIICKGHRITQVVLRLGNLPPFFRGSEVPFPRPCRTKCQKKVPSASPWGLHPRTASITLPTTSLKGSRTSCCPRSHPRLPRTKWPLQCLLHSLGTTGTLVWERGVLQMRSLEAHCPLQTFHLHHCRTQPSSCPPAWILYQGQWSGAVVGLRPVAHHLPRPIQGLHCPQAPHQPALSWGKWPVGMTGPARCCRWPRRMCSSLALPTGLTSLILPSSDLAVLISSSTSHFLMRSPVLPSSRLTCASPQLPRMWTWSSWLKEWGGQAHRQRNCRVNAVEELHSRRMSVRIVKNWVSCCYVRLSAVGLSTWSALDSLILSFQRVKTSRILNLQVLKKILRSFMKLYHSLVMCLRLRTKLEKALSALFIWPQHSYKGQAFGSLCQLVSADFSAPQVTRLRSLNHLLIRWIFSNQLTVQMLCLPIIKKMKKRIMVHVLKKNRKQIICIKNMFLQRKGFLNLSHVEKFRESTLGNFWMKLLQLPPACTSKAWTPRKLVGRAVRRKGVVINLKRLQKFRASVSFWTLLPTTGVRTRGSPLRLTLWPPRSQKSQHHCALRKIEWATKLSLGGKAGPQAQEKANILNSLPSSMEIAVLQEMLNQKCLAPFELKKNLLLPTYTPHICRHTLKKKPRDICRISGYPYDVPDYAS

SEQ ID NO: 1175 - protein, 1750 aa, Artificial Sequence
  hINV- and HA-extended poly-FSP polypeptide 1C
MHRRRSRSCREDQKPVMDDQRDLISNNEQLPMLGRRPGAPESKCSRGALYTGFSILVTLLLAGQATTAYFLYQQQGRLDKLTVTSQNLQLENLRMKLPKPPKPVSKMRMATPLLMQALPMGALPQGPMQNATKYGNMTEDHVMHLLQNADPLKVYPPLKGSFPENLRHLKNTMETIDWKVFESWMHHWLLFEMSRHSLEQKPTDAPPKESLELEDPSSGLGVTKQDLGPVPMSTRREMPSQATPSPPGPWRAALGKEVKRSQSKLRLRNTSPTEIQLTMNDSKHKLESPALKQVSPASPPTQQPQTPQDSRQVLAASSPGHPLGPGDCPRTMAGPSASLHPASGRASRKTWQRRLRACRAGGPAGWARQAMTLKALVKTWTQFRNYPRVGAGTGGGPACVPVAEASTGAWTAEGAAGTRCRASRAPCRQLPASSPTKCEICVKRRRRRKRSSQSRSPVPKKRERMMLPVRARTARSALPQGRAPLEGMLLPRALPSLLSRMPARRESRFWLALQALGLRPPHLPSCHPLPQLLGPPPPHQAPFDKKGFVILSKGKKRRKEIRRMTRRTMTTTKMMMMRRTKRRRRKRRRMTMMTRRTLLTKKTCLTPRTSAATKALPRQTISQRRPIQTPPGTSLAIWGRLPLRPQRGPRPLHRWLQQTTGCSQRRIAKKRIKLRRNTLAIRFISAPQPSSSTVTAAPSGQYFSSFFYTSDRTKCEICVKNTAILAITLITPQDPHLDPVCHPHRRPGWKGHHRVVFSHHPSGSTKSHWQQRERGGGRREKKGCREMPSSWSSSGRTADKKNVRSRTRLTLTGTRSSGTRASPSAVCLCCWTCPSRSFPAASPSGLRAPVGAQAPPEVTLRASCASSASKACAGLWPWGAQVRNKVRQNFKRNLAKKTLTNALRSMPKSRNQVLFRRNLTPSQLRTLAPPYMLLPQSLSQSLSRKQIPSQSMLVTAFFLLDIILRSLLYSRMCLVQIPTHTWEPDYFVSLPMMFSWATQSFPVGAVFLTRPAIPCCSCTSHSNPWSQSFKKKKPLTFSPSVPMSLACSITVSFVGQISTLVLDVSSISHWRKRKREKRSQKSRQNHLQLKSCRRKISNWSKLRSPWIFYPRLKTFGVPLGSILCLAGSLSTMMIISTTRQECGRRASVPCRPMIGSARPGPWRTSAMPSAMGVALPTSCESGRSPPATGGRMPGSQSIMMSWMPPLAPCAACPCSPAPTLCPAHPARAPTAVPAFTPLSAHPVPVLSGCHLAVRTSMLTLLPMRHPHRSPPTSCPPLLEAFPLPRASLRATVPRHSSVLATGLHLHRQISLPLRGFLLHQPLPGQHLWLSHRLRLRLPRTGEKNDLQLFVMSDTTYKIYWTVILLNPCGNLHLKTTSLRRARPTSCSTCRMWWLKLAPLQVTTTLKLILVMLEIVTEEAKKSMKRSRRSKIEASPIGSIMKKKDSTIFINQQLKWTPHILKSASVSKKRLPKLNGIWEVMPRTLEGCISVKDHRTSQNHSKCITECVRTALNQRKVVKNPSQPVPLRNDGITNGNDSTRSCSISLKKSLEKMPLMNAKKMEDMIWESNMGGNRSICLTRLPCKVTESSQRPPRSILSLASRAGQFPVWRRTSRGMSLQWKSGNACTPLRCPSRSPATFLTALNGWHRSGLRAQQPSLPGPCASLLSTLSQPPPQAPSQVWTAATLRCPAVPAAACPPIVFFLAPYFPTPLSISRPTSRARQSCCLPGLTHPAHQPLGSMGYPYDVPDYAS

SEQ ID NO: 1176 - protein, 1744 aa, Artificial Sequence
  hINV- and HA-extended poly-FSP polypeptide 2C
MHRRRSRSCREDQKPVMDDQRDLISNNEQLPMLGRRPGAPESKCSRGALYTGFSILVTLLLAGQATTAYFLYQQQGRLDKLTVTSQNLQLENLRMKLPKPPKPVSKMRMATPLLMQALPMGALPQGPMQNATKYGNMTEDHVMHLLQNADPLKVYPPLKGSFPENLRHLKNTMETIDWKVFESWMHHWLLFEMSRHSLEQKPTDAPPKESLELEDPSSGLGVTKQDLGPVPMRQINRRKLQRKKRRKKREDHCGLRARNRNMKKTMSHLIAHQALKMSGLRLFHPRLLTRKKPGKNPRRKTWKMRKKYAQKPSQKNHLYGKGLTHPVPLKRTLQNKRNKNIKRVNQKKGNIKRKSILLHLIVLNSPESNLQAHPQVPALAPQAWWPARRGPLTSAPSAQQSLTFLPSRFPWGPPPLHWNSAYLGRTLLVTCILYHRWIVTSMCQSQRWLTSTTSRSSALMWTQWSSVTSLEWTAQERGCSSWLMKQTWMKSWSLRDPSYRSILEYVSTRVLWMPTSTVGALRATAPATAAPQAQTPHWRAATTSSMSSSPRAEPTSSSSWATCWPRCCSSSCYWSLSSWPPAGAAEATNTRTRSRESQRGRMLTWRSSLWLQGTRCFTGVRTSSRHPSWPWTRCLRMRPPRSNSRKKLLEDMKQNGFTRYKKRGVIAWRRATFLLALWECSLPQARLCLIVSRTLLLVQSRCSLMEQIPHLKSWWCTRGGGKRKKKMCKVSGGCTACVERCPWKGICWKWPVTVAALILIQHGGIFTFRFWVEKLSWNICKNLSLYLDKFVQRLLYVYIIETNVFVLNLFHVPVNQIFMMAFYLKYTEKAWVMELEWLIQQQCYQLLLAHMYGFSTYGTQKGECVCLQCLSGSSLFILKQPLDLKISKTFMSRSHLDFSPYWMKKVKASPQIMQRMSAVNFETIRRKWQIRHVLKNLPLENTQIPRTSPLWKITMVLTYPNCVVHVLMFVLFKADQSESSLSSGIYPPSTCSLPCRGIRMCALSHPSFYISSTVCFLSKHCMTACTREKIINPTISCPFQSPTKRLGHREGSESDNLGLLYSFPPWLPMRSLGEPWRAGFQWGESPWQVMASLTGNSVIVHKIVLVFLKSLSSYNCERRISGIQKRAIEFAVLKLLNMDLASPQIMQRTSADRFRMKRRMQNLDNLGVPWPLLPGAAPPHRLLGPSRWILFHVRNIVYGIQVMLCRRRNSRKQSQVQLAIQVLLVDKHKYFLFGPYPISEGLTMTTGRNINSNSLMTNCLFSPIFLCHHAIMHRKMTSPHFRLFSSKIPHPQVPSVVALCKFLANGLWFNLIFQKKGHMIFSPKFFLTFSQRTLESAGLFPWLHTQCRNKKTKLWFSLINIHHRKNPLLPMRMSRTPPRRVCGSPPLHLCQPLRGGKKRSKFAFWKPPSQGISSCLMTGCWGSCGRACSCGRGCGTPRGDWKRHPPRRELSLEPWIPYLHQQKTQRKRMKTGAIQEKGAIQEKGAMTKRICVVNFEACREMESLSAPEKITLFEAHMARCTSINVLCVRASLIEKLMKEKRKMKRNQVASPQIMQRLFIKGYQNNHFTFHLQNFAFFSSFGNNKYINILTRAFIHTPRSPGCSVYANMCWRKMQSLNHPSRLTNCHPAWLSPISACPRLLPYPFHVLALEVTFPPGTAMPQMQLQALAMWEKGWDKQEKKSRKLMSSCLEKKATWMRRTPGTSLQCYLNTHPCTMLLPQGIPSLNAQWMFLRIGYPYDVPDYAS

SEQ ID NO: 1177 - protein, 1749 aa, Artificial Sequence
  hINV- and HA-extended poly-FSP polypeptide 3C
MHRRRSRSCREDQKPVMDDQRDLISNNEQLPMLGRRPGAPESKCSRGALYTGFSILVTLLLAGQATTAYFLYQQQGRLDKLTVTSQNLQLENLRMKLPKPPKPVSKMRMATPLLMQALPMGALPQGPMQNATKYGNMTEDHVMHLLQNADPLKVYPPLKGSFPENLRHLKNTMETIDWKVFESWMHHWLLFEMSRHSLEQKPTDAPPKESLELEDPSSGLGVTKQDLGPVPMPIPPHLRHPLLLKNKKRRKLRPKSRKKGHTKNRRKAKRKPQIRNSRRATPTSKGSLRRKYLRVGAAAASCQSPPSPRETTPSSDATRRTRPIAAQSKKTMTAAGLTPSQKKDPAGKLKKQVSVYSGNLLSFSRRGMKSSVRLKNCTNLSVPMMLTILIWKRVFILLLSDKKSIPHVPKATAAHSVTVKLQSRRNRRYRKIYGELKMSLQASNGMEACGTHPTPRLSVSVITMKLWEKHFKGLNWNLVVWILNLKMMLKKKYLVQREWEKRKQILGGGGKYKEYFLKRILIRKAMTVLAGDKKGLGRFMRCVQSETKAVSLQLPLGRMDLDGMLTVIGQGLVGMTPRDLGTVAGATAQIQRPIQVQTGGRLRGPRRKVLMVLWLPANQSLQKSQVFQWVLRTELPLTFSTLLWDSRHDLPRMLPISSPLHRPQMPFWTCTFPATTWGTWETPSTWGWRTFARQPSRPTGRTPTTRLMAPVGSVMSCSLLTQPSPASACTMPPLLHPQWAPHSAGLSPGACRPACTCISMTTISRATWRRNLQRNLKVLRLRIPSLRKYRQQNTRSTNLEKNPSLKKQSQRRGKLSLTTLSFVLIEELLKKSSQLRRSWRNVSRISNIRKLIWTKQRSFLSLFPKLRATEQMTNVGCRLDFHPRSSSGDRVFLVKIQSSPFLARSWNTMQWNNKKMAMTVIAGAHHCQYKLTYTKVWKMNWKKMMIGSQHLLFSPLDSSPLQLLLHPHGKRCNPCCRLTWMSHLNRKLHLTRSCLIDLTMMMSQKLWKNQRKRIPLPSPRQHLLPQYPLHPPPPCLLLLHHRHHLAFLEMACSSQHTHSIKIWISFSHETMSLSNILMKFRLTTTTSSPRRSPALRARGGTTIGEVTSSLFFSHCLCVAPRCPRSAVDISPGPTSPSLASCASVAIGKLALLGASAPCGAAGAREAGRFAVLGTMVMKNMEHRLTMDSALSLTKREGPETGPVYYVCNRMNVSSVLKPFLFTVPIEDMRECTLGRNRMNVSSVLKPCLIPVPICKKKLLLKLLRGASSSTSRDSRSFFTSAHPSRPCRMRLYQMLQKQCCYNLVIKHPLIFRINLRRQGKTKDGVVQSLGFLNQQIILQKEFFICLLMFIKRWKPAATKKGKNSPCCQKKLRVQNQGHLLMILLHNRGPPLHTRFEKKRPEWLSRKSGVMKCWDLCPAFSGRILHQPEMAAMRLMPKFLNSTNSWWTVHKKRGLFHQMKCLTAVDCLQAFWDMSEKKRKLPMIRKIQKRRRTANRNIEITPQRSKAHLKKTSAKGAKKITFLCLRVRCGGWLCGWTPRGWLKKSTKSRLCFFYLLYYLFFLTVCGFTPPPLILWPQAAPGEKLKHCFKAWGVDPPGSVWILPCFLIHLRKVDTHHLQVVTKTVTATTADGQRMRRLKCKACRLRWARPEPAAQAPPKSHFPPHPSGPSRTSSLQLRTYMEMHYGHQAPQVAMLPKLLCRQMLPTLSTLQQRHPQGPCPPPVTPLRVQSVLLLGVPQTAGYPYDVPDYAS

SEQ ID NO: 1178 - protein, 1750 aa, Artificial Sequence
  hINV- and HA-extended poly-FSP polypeptide 4C
MHRRRSRSCREDQKPVMDDQRDLISNNEQLPMLGRRPGAPESKCSRGALYTGFSILVTLLLAGQATTAYFLYQQQGRLDKLTVTSQNLQLENLRMKLPKPPKPVSKMRMATPLLMQALPMGALPQGPMQNATKYGNMTEDHVMHLLQNADPLKVYPPLKGSFPENLRHLKNTMETIDWKVFESWMHHWLLFEMSRHSLEQKPTDAPPKESLELEDPSSGLGVTKQDLGPVPMDSKKMTQKNRKTRKAAREKHRKTDNLDLQHQRRRKKKKDKVEIRNRSPKANSTECQGEHSREQNLLNLVQLNPHSPHHRKDEEDHQKRHHHHNQKKMSVNEGNNHWPRVEMPTGWLLVGYNTRNTAQNPRLQQHLKHWQQCTRARWCQEPCQTLTFFHFFFFFKTVSLCCPGWSKGQPPPPGLKPSSLASQVARTTGVYQHVWLICFVFFVCVETGFCHVAQVGLERLVSLSGITDVNHWAQPKPSPSKGTGMNRPIGLRVGKGVWARLWLKNWKRFKLKKKYTGMEILLWILLKMEIQIFKICLGEMQLCLKKKVNACSNAKKMPFQCRCRREYRVTMIQKKKQKSPLFFHGDLCRPSPCLSWSSRIVAPGHALSCRTRRRWSSKMAKKSQQPLCRGGPSASDRCCSCSPSGFSAGRGRCPVQGCLRPHRVQLLRRWGPGSPAGQRLSKGFQLLRWWGPGSPAPEPRKGPFPPPDPPWPVTAVTVMAGSVPSAQSVDALESPGPLALEGPSSPRNLLWREMSIFLPGIFNLHLCYYHSQSNRNKSRQMESLGMKLQITHPFASQPLGQEMPNNTQIRLLKPGQAFGSFSADFSAPQQAPLRLWSWCGTSQTYFGSIEALTALFTCRTASISVNISTLMSILEAILAMTLTLNGSPLWDCSTTTGTHHGCLWEIPSVTLLATAKKSPTSFCCQRPPLQPVEEKKNGRISSVPPSPPLALGPRMQLCTQLARFFPITPPVWHILGPQRHTPLLTPDTRWIFSNQLQTVQMLCLPPLKQGERIIWPLGGFQIPNFFWSLGIGHTGAWWHTGRRRREWGGSTVSRSPLWISSMIYLRGMAFASDSSIRTTRVSWCRRCGAKSAAASSDKKKKSTEKTKNKIICKGHRITQVVLRLGNLPPFFRGSEVPFPRPCRTKCQKKVPSASPWGLHPRTASITLPTTSLKGSRTSCCPRSHPRLPRTKWPLQCLLHSLGTTGTLVWERGVLQMRSLEAHCPLQTFHLHHCRTQPSSCPPAWILYQGQWSGAVVGLRPVAHHLPRPIQGLHCPQAPHQPALSWGKWPVGMTGPARCCRWPRRMCSSLALPTGLTSLILPSSDLAVLISSSTSHFLMRSPVLPSSRLTCASPQLPRMWTWSSWLKEWGGQAHRQRNCRVNAVEELHSRRMSVRIVKNWVSCCYVRLSAVGLSTWSALDSLILSFQRVKTSRILNLQVLKKILRSFMKLYHSLVMCLRLRTKLEKALSALFIWPQHSYKGQAFGSLCQLVSADFSAPQVTRLRSLNHLLIRWIFSNQLTVQMLCLPIIKKMKKRIMVHVLKKNRKQIICIKNMFLQRKGFLNLSHVEKFRESTLGNFWMKLLQLPPACTSKAWTPRKLVGRAVRRKGVVINLKRLQKFRASVSFWTLLPTTGVRTRGSPLRLTLWPPRSQKSQHHCALRKIEWATKLSLGGKAGPQAQEKANILNSLPSSMEIAVLQEMLNQKCLAPFELKKNLLLPTYTPHICRHTLKKKPRDICRISGYPYDVPDYAS

SEQ ID NO: 1179 - protein, 1547 aa, Artificial Sequence
  hTPA- and HA-extended poly-FSP polypeptide 1D
MDAMKRGLCCVLLLCGAVFVSPSQEIHARADKKNVRSASSPGHPLGPRRMTRRTMTTTKMMMMRRTKRRRRKRRRMTMMTRRTLLTKKTCLTPRTSAATKALPRQTISQRRPIQTPPGTSLAIWGRRSKIEASPIGSITPLSISRPTSRARQSCCLPGLTHPAHQPLGSMVGAGTGGGPACVPVAEASTGAWTAEGAAGTRCRASRAPCRQLPASSPTKCEICVKRRRRRKRSSQSRSPVPKKRERMMLPVRARTARSALPQGRAPLEGMLLPRALPSLLSRMPARRESRFWLALQALGLRPPHLPSCHPLPQLLGPPPPHQAPGEKNDLQLFVMSDTTYKIYWTVILLNPCGNLHLKTTSLNAKKMEDMIWESNQQLKWTPHILKSASIAKKRIKLRRNSTRREMPSQATPSPPGPWRAALGKEVKRSQSKLRLRNTSPFDKKGFVILSNMGGNRSICLTIVFFLAPYFPMPSSWSSSGRTRLPLRPQRGPRPLHRWLQQTTGCSQRRGDCPRTMAGPSASLHPASGRASRKTWQRRLRACRAGGPAGWARQARKRKREKRSQKSRQNHLQLKSCRRKISNWSKLRSPWIFEAKKSMKRSQRPPRSILSLFKKKKPLTFSPSVSKKRLPKLKGKKRRKEIQRKVVKNPSQPVPLRNDGITNGNDSTRSCSISLKKSLEKMPLMRSLLYSRMCLVQIPTHTWEPDYFVSLPMMFSWATQSFPVGAVFLTRPAIPCCSCTSHSNPWSQSTLAIRFISAPQPSSSTVTAAPSGQYFALRSMPKSRNQVLFRRNLTPSQLRTLAPPYMLLPQSLSQSLSRKQIPSQSMLVRTRLTLTGTRSSGTRASPSAVCLCCWTCPSRSFPAASPSGLRAPVGAQAPPEVTLRASCASSASKACAGLWPWGAQVRMKKKDSTIFIYPRLKTFGVPLGSILCLAGSLSTMMIISTTRQECGRRASVPCRPMIGSARPGPWRTSAMPSAMGVALPTSCESGRSPPATGGRMPGSQSIMMSWMPPLAPCAACPCSPAPTLCPAHPARAPTAVPAFTPLSAHPVPVLSGCHLAVRTSMLTLLPMMTLKALVKTWTQFRNYPRRHPHRSPPTSCPPLLEAFPLPRASLRATVPRHSSVLATGLHLHRQISLPLRGFLLHQPLPGQHLWLSHRLRLRLPRTTEIQLTMNDSKHKLESPALKQVSPASPPTQQPQTPQDSRQVLAVPMSLACSITVSFVGQISTLVLDVSSISHWNGIWEVMPRTLEGCISVKDHRTSQNHSKCITECVRTALNTKCEICVKNTAILAITLITPQDPHLDPVCHPHRRPGWKGHHRVVFSHHPSGSTKSHWQQRERGGGRREKKGCREASRAGQFPVWRRTSRGMSLQWKSGNACTPLRCPSRSPATFLTALNGWHRSGLRAQTAFFLLDIILRRARPTSCSTCRMWWRLPCKVTESSLAKKTLTNQPSLPGPCASLLSTLSQPPPQAPSQVWTAATLRCPAVPAAACPPLKLAPLQVTTTLKLILVMLEIVTENKVRQNFKRNSSFFYTSDRGYPYDVPDYAS

SEQ ID NO: 1180 - protein, 1541 aa, Artificial Sequence
  hTPA- and HA-extended poly-FSP polypeptide 2D
MDAMKRGLCCVLLLCGAVFVSPSQEIHARRKMQSLNHPSRLTNNPRRKTWKMRKKYAQKPSQKNHLYRQINRRKLQRKKSRSHLDFSPYWMKKVKRARNRNMKKTMSHLIAHQALKMSGLRLFHPRLLTRKKPGKQKKGHMIFSRRKWQIRHVLKNLIPSLNAQWMFLRIASPQIMQRTSADRFRMKRRMQNLDNLGVPWPLLPGLLLAHMYGFSTYGTQKGECVCLQCLSGSSLFILKQPLDLKISKTFMASPQIMQRMSAVNFETILQAHPQVPALAPQAWWPARRGPLTSAPSAQQSLTRTLESAGLFPWLHTQCRAFIHTPRSPGCSVYANMCWRYKKRGVIAWRIYPPSTCSLPCRGLILIQHGGIFTFRFWVEKLSWNICKNLSLYLDKFVQRLLYVYIIETNVFVLNLFHVPVNQIFMMAFYLKYTEKAWVMELEWLIQQQCYQRKRMKTGAIQEKGAIQEKGAMTKRICVVNFEACREMESLSAPEKITLFEAHMARCTSINVLCVRASLIEKLMKEKRKMKRNQVASPQIMQRLFIKGYQNNHFTFHLQNFAFFSSFGNNKYINILTFLPSRFPWGPPPLGALRATAPATAAPQAQTPHWRAATTSSMSSSPRAEPTSSSSWATCWPRCCSSSCYWSLSSWPPAGAAEATNTRTRSRESQRGRMLTWRSSLWLQGTRCFTGVRTSSRCSLMEQIPHLKSNSRKKLLEDMKQNGFTRRRNSRKQSQVQLAIQVLLVDKHKYFLFGRATFLLALWECSLPQARLCLIVSRTLLLVQSRHPSWPWTRCLRMRPPRSHWNSAYLGRTLLVTCILYHRWIVTSMCQSQRWLTSTTSRSSALMWTWWCTRGGGKRKKKMCKVSGGCTACVERCPWKGICWKWPVTVAAMSRTPPRRVCGHREGSESDNLGLLYSFPPVLFKADQSESSLSSGNSVIVHKIVLVFLKSLSSYNCERRISGIQKRAIEFAVLKLLNMDLGKGLTHPVPLKRTLQNKRNKNIKRVNQKKGNIKRKSILLHLIVLNSPESNREKIINPTISCPFQSPTKRLGSPPLHLCQPLRPYPISEGLTMTTGRNINSNSLMTNCLFSPIFLCHHAIMHRKMTSPHFRLFSSKIPHPQVPSVVALCKFTHPCTMLLPQGAFWKPPSQGISSCLMTGCWQWSSVTSLEWTAQERGCSSWLMKQTWMKSWSLRDPSYRSILEYVSTRVLWMPTSTVPKFFLTFSQIRMCALSHPSFYISSTVCFLSKHCMTACTPGTSLQCYLNLANGLWFNLIFRNKKTKLWFSLINIHHRKNPLLPMRLEKKATWMRRTELSLEPWIPYLHQQKTQWLPMRSLGEPWRAGFQWGESPWQVMASLTGRRKKREDHCGLQEKKSRKLMSSCAAPPHRLLGPSRWGSCGRACSCGRGCGTPRGDWKRHPPRRILFHVRNIVYGIQVMLCCHPAWLSPISACPRLLPYPFHVLALEVTFPPGTAMPQMQLQALAMWEKGWDKPLENTQIPRTSPLWKITMVLTYPNCVVHVLMFGGKKRSKFGYPYDVPDYAS

SEQ ID NO: 1181 - protein, 1546 aa, Artificial Sequence
  hTPA- and HA-extended poly-FSP polypeptide 3D
MDAMKRGLCCVLLLCGAVFVSPSQEIHARQNTRSTNLEKNPSLKKQSQRRGKLSSRKKGHTKNRRKAKRKPQISQKKDPAGKLKKHLNRKLHLTRSCLIDLTMMMSQKLWKNQRKRIPLPSPRQHLLPQYPLHPPPPCLLLLHHRHHLAFLEMACSSQHTHSIKIWISFSHEDLPRMLPISSPLHRPQMPFWTCTFPATTWGTWETPSTWGWRTFGPVYYVCNRMNVSSVLKPFLFTVPIEDMRECTLGRNRMNVSSVLKPCLIPVPILTTLSFVLIEESRRNRRYRKIYGELKMSLQALPLTFSTLLWDSRHTTTTSSPRRSPALRARGGTTIGEVTSRGASSSTSRDSRSFFTSAHPSRPCRMRLYQSNGMEACGTHPTPRLSRGPPLHTRTMSLSNILMKFRLMLQKQCCYNLVIKHPLIFRINLRRQGKTKDGVVQSLGFLNQQIILQKEFFICLLMFIKRWKPAATKTPPPLILWPQAAPVHKKRGLFSLFFSHCLCHQMKCLTAVDCLQAFWDMMIRKIQKRRRTANRLKKKYLVQCTNLSVPMMLTILIWKRVFILLLSDKKCLRVRCGGWLCGWTPRGKNKKRRKLRPKHLKKTSAKVSVITMKLWEKHFKGLNWNLVVWILNLKMMWLKKSTKSRQSSPFLARSWNTMQWNNKKMAMTVIAGAHHCQYKLTYTKVWKMNWKKMMIGSQHLLFSPLDSSPLQLLLHPHGKRCNPCCRLTWMSREWEKRKQILGGGGKYKEYFLKRILIRKAMTVLAGDKKGLGRFMRCVQSETKAVSLQLPLGRRKSGVMKCWDLCPRLDFHPRSSSGGEKLKHCFKAWGLCFFYLLYFEKKRPEWLSVDPPGSVWILPCMDLDGMLTVIGQGLVGMTPRDLGTVAGATAQIQRPIQVQTGGRLFLIHLRKVDTHHLQVVTKTVTATTADGQRMRRLKCKACRLRWARPEPAAQAPPKSHFPPHPSGPSRTSSLQLRPIPPHLRHPLLLKGKNSPCCQKKLRVQNQGHLLMILLHNARQPSRPTGRTPTTRLMAPVGSVMSCSLLTQPSPASACTMPPLLHPQWAPHSAGLSPGACRPACTCISMTTISRATWRLRIPSLRKYRQNIEITPQRSKAQVSVYSGNLLSFSRRGMKSSVRLKNSIPHVPKATAAHSVTVKLQYLFFLTVCGFDRVFLVKICKKKLLLKLLRGPRRKVLMVLWLPANQSLQKSQVFQWVLRTETYMEMHYGHQAPQVAMLPKLLCRQMLPTLSTLQQRHPQGPCPPPVTPLRVQSVLLLGVPQTAAFSGRILHQPEMAAMRLMPKFLNSTNSWWTVAPRCPRSAVDISPGPTSPSLASCASVAIGKLALLGASAPCGAAGAREAGRFAVLGTMVMKGAAAASCQSPPSPRETTPSSDATRRTRPIAAQSKKTMTAAGLTPRRNLQRNLKVLGAKKITFLRNSRRATPTSKGSLRRKYLRVNIRKLIWTKQRSFLSLFPKLRATEQMTNVGCLLKKSSQLRRSWRNVSRISNMEHRLTMDSALSLTKREGPETSEKKRKLPGYPYDVPDYAS

SEQ ID NO: 1182 - protein, 1547 aa, Artificial Sequence
  hTPA- and HA-extended poly-FSP polypeptide 4D
MDAMKRGLCCVLLLCGAVFVSPSQEIHARNRKTRKAAREKHRKTDDKKKKSTEKTKNAKKMPFQQRPPLQPVNLDLQHQRRRKKKKDKVEIRNRSPKANSTECQGEHSREQNLLNLVQLNPHSPHHRKDEEDHQKRHHHHNQKKMSVRASVSFWTLLPTTGVRTRGSPLRLTLWPPRVPPSPPLALGPRMQLCTQLARFFPITPPVWHILGPQRHTPQAPLRLWSWCGTSQTYFGSRPSPCLSWSSRIVAPGHALSCRTRRRWSSKRWIFSNQLTVQMLCLPITHPFASQPLGQEMPNNTQIRLLKPCRVNAVEELHSRRMSVRIVKNWVSCCYVRLSAVGLSTWSALDEEKKNGRISSLKKKVNACSSLILSFQRVKTGMEILLWILLKMEIQIFKICLGEMQLCGQAFGSFSADFSAPQIIKKMKKRIMVHELKKNLLLPMCSSLALPTGLTSLILPSSDLAVLISSSTSHFLMRSPVLPSSRLTCASPQLPRMWTWSSWLKNEGNNHWPRVEMPTGWLLVGYNTRNTAQNPRLQQHLKHWQQCTRARWCQEPCQTLTFFHFFFFFKTVSLCCPGWSKGQPPPPGLKPSSLASQVARTTGVYQHVWLICFVFFVCVETGFCHVAQVGLERLVSLSGITDVNHWAQPKPSPSKGTGMNRPIGLRVGKGVWARLILAMTLTLNGMAKKSQQPLQVVLRLGNLPPFFRGSEVPFPRPCRTKPACTSKAWTPRKLVGRAVRRKGSPLWDCSTTTGTHHGCLWEIPSVTLLAHPRTASITLPTTSLKGSRTSCCPRSHPRLPRTKWPLQCLLHSLGTTGTLVWERGVLQMRSLEAHCPLQTFHLHHCRTQPSSCPPAWILYQGQWSGAVVGLRPVAHHLPRPIQGLHCPQAPHQPALSWGKWPVGMTGPARCCRWPRRCQKKVPSASPWGLVLKKNRKQMLNQKCLAPFRESTLGNFWMKLLQLPVVINLKRLQKFNLHLCYYHSQSNRNKSRQMESLGMKLQSQKSQHHCALRKIEWATKLSLGGKAGPQAQEKATSRILNLQVLKKILRSFMKLYHSLVMCLRLRTKLEKALSALFIWPQHSYKPLFFHGDLCEWGGQAHRQRNWLKNWKRFKLKKKYIQKKKQKSNKIICKGHRITIICIKNMFLQRKGFLNLSHVEKFCRGGPSASDRCCSCSPSGFSAGRGRCPVQGCLRPHRVQLLRRWGPGSPAGQRLSKGFQLLRWWGPGSPAPEPRKGPFPPPDPPWPVTAVTVMAGSVPSAQSVDALESPGPLALEGPSSPRNLLWREMSIFLPGIFTAKKSPTSFCCNILNSLPSSMEIAVLQEDSKKMTQKGQAFGSLCQLVSADFSAPQVTRLRSLNHLLITYTPHICRHTLLTPDTRWIFSNQLQTVQMLCLPPLKQGERIIWPLGGFQIPNFFWSLGIGHTGAWWHTGRRRREWGGSTVSRSPLWISSMIYLRGMAFASDSSIRTTRVSWCRRCGAKSAAASSIEALTALFTCRTASISVNISTLMSILEALKKKPRDICRISCRCRREYRVTMGYPYDVPDYAS

SEQ ID NO: 1183 - protein, 1750 aa, Artificial Sequence
  hINV- and HA-extended poly-FSP polypeptide 1D
MHRRRSRSCREDQKPVMDDQRDLISNNEQLPMLGRRPGAPESKCSRGALYTGFSILVTLLLAGQATTAYFLYQQQGRLDKLTVTSQNLQLENLRMKLPKPPKPVSKMRMATPLLMQALPMGALPQGPMQNATKYGNMTEDHVMHLLQNADPLKVYPPLKGSFPENLRHLKNTMETIDWKVFESWMHHWLLFEMSRHSLEQKPTDAPPKESLELEDPSSGLGVTKQDLGPVPMADKKNVRSASSPGHPLGPRRMTRRTMTTTKMMMMRRTKRRRRKRRRMTMMTRRTLLTKKTCLTPRTSAATKALPRQTISQRRPIQTPPGTSLAIWGRRSKIEASPIGSITPLSISRPTSRARQSCCLPGLTHPAHQPLGSMVGAGTGGGPACVPVAEASTGAWTAEGAAGTRCRASRAPCRQLPASSPTKCEICVKRRRRRKRSSQSRSPVPKKRERMMLPVRARTARSALPQGRAPLEGMLLPRALPSLLSRMPARRESRFWLALQALGLRPPHLPSCHPLPQLLGPPPPHQAPGEKNDLQLFVMSDTTYKIYWTVILLNPCGNLHLKTTSLNAKKMEDMIWESNQQLKWTPHILKSASIAKKRIKLRRNSTRREMPSQATPSPPGPWRAALGKEVKRSQSKLRLRNTSPFDKKGFVILSNMGGNRSICLTIVFFLAPYFPMPSSWSSSGRTRLPLRPQRGPRPLHRWLQQTTGCSQRRGDCPRTMAGPSASLHPASGRASRKTWQRRLRACRAGGPAGWARQARKRKREKRSQKSRQNHLQLKSCRRKISNWSKLRSPWIFEAKKSMKRSQRPPRSILSLFKKKKPLTFSPSVSKKRLPKLKGKKRRKEIQRKVVKNPSQPVPLRNDGITNGNDSTRSCSISLKKSLEKMPLMRSLLYSRMCLVQIPTHTWEPDYFVSLPMMFSWATQSFPVGAVFLTRPAIPCCSCTSHSNPWSQSTLAIRFISAPQPSSSTVTAAPSGQYFALRSMPKSRNQVLFRRNLTPSQLRTLAPPYMLLPQSLSQSLSRKQIPSQSMLVRTRLTLTGTRSSGTRASPSAVCLCCWTCPSRSFPAASPSGLRAPVGAQAPPEVTLRASCASSASKACAGLWPWGAQVRMKKKDSTIFIYPRLKTFGVPLGSILCLAGSLSTMMIISTTRQECGRRASVPCRPMIGSARPGPWRTSAMPSAMGVALPTSCESGRSPPATGGRMPGSQSIMMSWMPPLAPCAACPCSPAPTLCPAHPARAPTAVPAFTPLSAHPVPVLSGCHLAVRTSMLTLLPMMTLKALVKTWTQFRNYPRRHPHRSPPTSCPPLLEAFPLPRASLRATVPRHSSVLATGLHLHRQISLPLRGFLLHQPLPGQHLWLSHRLRLRLPRTTEIQLTMNDSKHKLESPALKQVSPASPPTQQPQTPQDSRQVLAVPMSLACSITVSFVGQISTLVLDVSSISHWNGIWEVMPRTLEGCISVKDHRTSQNHSKCITECVRTALNTKCEICVKNTAILAITLITPQDPHLDPVCHPHRRPGWKGHHRVVFSHHPSGSTKSHWQQRERGGGRREKKGCREASRAGQFPVWRRTSRGMSLQWKSGNACTPLRCPSRSPATFLTALNGWHRSGLRAQTAFFLLDIILRRARPTSCSTCRMWWRLPCKVTESSLAKKTLTNQPSLPGPCASLLSTLSQPPPQAPSQVWTAATLRCPAVPAAACPPLKLAPLQVTTTLKLILVMLEIVTENKVRQNFKRNSSFFYTSDRGYPYDVPDYAS

SEQ ID NO: 1184 - protein, 1744 aa, Artificial Sequence
  hINV- and HA-extended poly-FSP polypeptide 2D
MHRRRSRSCREDQKPVMDDQRDLISNNEQLPMLGRRPGAPESKCSRGALYTGFSILVTLLLAGQATTAYFLYQQQGRLDKLTVTSQNLQLENLRMKLPKPPKPVSKMRMATPLLMQALPMGALPQGPMQNATKYGNMTEDHVMHLLQNADPLKVYPPLKGSFPENLRHLKNTMETIDWKVFESWMHHWLLFEMSRHSLEQKPTDAPPKESLELEDPSSGLGVTKQDLGPVPMRKMQSLNHPSRLTNNPRRKTWKMRKKYAQKPSQKNHLYRQINRRKLQRKKSRSHLDFSPYWMKKVKRARNRNMKKTMSHLIAHQALKMSGLRLFHPRLLTRKKPGKQKKGHMIFSRRKWQIRHVLKNLIPSLNAQWMFLRIASPQIMQRTSADRFRMKRRMQNLDNLGVPWPLLPGLLLAHMYGFSTYGTQKGECVCLQCLSGSSLFILKQPLDLKISKTFMASPQIMQRMSAVNFETILQAHPQVPALAPQAWWPARRGPLTSAPSAQQSLTRTLESAGLFPWLHTQCRAFIHTPRSPGCSVYANMCWRYKKRGVIAWRIYPPSTCSLPCRGLILIQHGGIFTFRFWVEKLSWNICKNLSLYLDKFVQRLLYVYIIETNVFVLNLFHVPVNQIFMMAFYLKYTEKAWVMELEWLIQQQCYQRKRMKTGAIQEKGAIQEKGAMTKRICVVNFEACREMESLSAPEKITLFEAHMARCTSINVLCVRASLIEKLMKEKRKMKRNQVASPQIMQRLFIKGYQNNHFTFHLQNFAFFSSFGNNKYINILTFLPSRFPWGPPPLGALRATAPATAAPQAQTPHWRAATTSSMSSSPRAEPTSSSSWATCWPRCCSSSCYWSLSSWPPAGAAEATNTRTRSRESQRGRMLTWRSSLWLQGTRCFTGVRTSSRCSLMEQIPHLKSNSRKKLLEDMKQNGFTRRRNSRKQSQVQLAIQVLLVDKHKYFLFGRATFLLALWECSLPQARLCLIVSRTLLLVQSRHPSWPWTRCLRMRPPRSHWNSAYLGRTLLVTCILYHRWIVTSMCQSQRWLTSTTSRSSALMWTWWCTRGGGKRKKKMCKVSGGCTACVERCPWKGICWKWPVTVAAMSRTPPRRVCGHREGSESDNLGLLYSFPPVLFKADQSESSLSSGNSVIVHKIVLVFLKSLSSYNCERRISGIQKRAIEFAVLKLLNMDLGKGLTHPVPLKRTLQNKRNKNIKRVNQKKGNIKRKSILLHLIVLNSPESNREKIINPTISCPFQSPTKRLGSPPLHLCQPLRPYPISEGLTMTTGRNINSNSLMTNCLFSPIFLCHHAIMHRKMTSPHFRLFSSKIPHPQVPSVVALCKFTHPCTMLLPQGAFWKPPSQGISSCLMTGCWQWSSVTSLEWTAQERGCSSWLMKQTWMKSWSLRDPSYRSILEYVSTRVLWMPTSTVPKFFLTFSQIRMCALSHPSFYISSTVCFLSKHCMTACTPGTSLQCYLNLANGLWFNLIFRNKKTKLWFSLINIHHRKNPLLPMRLEKKATWMRRTELSLEPWIPYLHQQKTQWLPMRSLGEPWRAGFQWGESPWQVMASLTGRRKKREDHCGLQEKKSRKLMSSCAAPPHRLLGPSRWGSCGRACSCGRGCGTPRGDWKRHPPRRILFHVRNIVYGIQVMLCCHPAWLSPISACPRLLPYPFHVLALEVTFPPGTAMPQMQLQALAMWEKGWDKPLENTQIPRTSPLWKITMVLTYPNCVVHVLMFGGKKRSKFGYPYDVPDYAS

SEQ ID NO: 1185 - protein, 1749 aa, Artificial Sequence
  hINV- and HA-extended poly-FSP polypeptide 3D
MHRRRSRSCREDQKPVMDDQRDLISNNEQLPMLGRRPGAPESKCSRGALYTGFSILVTLLLAGQATTAYFLYQQQGRLDKLTVTSQNLQLENLRMKLPKPPKPVSKMRMATPLLMQALPMGALPQGPMQNATKYGNMTEDHVMHLLQNADPLKVYPPLKGSFPENLRHLKNTMETIDWKVFESWMHHWLLFEMSRHSLEQKPTDAPPKESLELEDPSSGLGVTKQDLGPVPMQNTRSTNLEKNPSLKKQSQRRGKLSSRKKGHTKNRRKAKRKPQISQKKDPAGKLKKHLNRKLHLTRSCLIDLTMMMSQKLWKNQRKRIPLPSPRQHLLPQYPLHPPPPCLLLLHHRHHLAFLEMACSSQHTHSIKIWISFSHEDLPRMLPISSPLHRPQMPFWTCTFPATTWGTWETPSTWGWRTFGPVYYVCNRMNVSSVLKPFLFTVPIEDMRECTLGRNRMNVSSVLKPCLIPVPILTTLSFVLIEESRRNRRYRKIYGELKMSLQALPLTFSTLLWDSRHTTTTSSPRRSPALRARGGTTIGEVTSRGASSSTSRDSRSFFTSAHPSRPCRMRLYQSNGMEACGTHPTPRLSRGPPLHTRTMSLSNILMKFRLMLQKQCCYNLVIKHPLIFRINLRRQGKTKDGVVQSLGFLNQQIILQKEFFICLLMFIKRWKPAATKTPPPLILWPQAAPVHKKRGLFSLFFSHCLCHQMKCLTAVDCLQAFWDMMIRKIQKRRRTANRLKKKYLVQCTNLSVPMMLTILIWKRVFILLLSDKKCLRVRCGGWLCGWTPRGKNKKRRKLRPKHLKKTSAKVSVITMKLWEKHFKGLNWNLVVWILNLKMMWLKKSTKSRQSSPFLARSWNTMQWNNKKMAMTVIAGAHHCQYKLTYTKVWKMNWKKMMIGSQHLLFSPLDSSPLQLLLHPHGKRCNPCCRLTWMSREWEKRKQILGGGGKYKEYFLKRILIRKAMTVLAGDKKGLGRFMRCVQSETKAVSLQLPLGRRKSGVMKCWDLCPRLDFHPRSSSGGEKLKHCFKAWGLCFFYLLYFEKKRPEWLSVDPPGSVWILPCMDLDGMLTVIGQGLVGMTPRDLGTVAGATAQIQRPIQVQTGGRLFLIHLRKVDTHHLQVVTKTVTATTADGQRMRRLKCKACRLRWARPEPAAQAPPKSHFPPHPSGPSRTSSLQLRPIPPHLRHPLLLKGKNSPCCQKKLRVQNQGHLLMILLHNARQPSRPTGRTPTTRLMAPVGSVMSCSLLTQPSPASACTMPPLLHPQWAPHSAGLSPGACRPACTCISMTTISRATWRLRIPSLRKYRQNIEITPQRSKAQVSVYSGNLLSFSRRGMKSSVRLKNSIPHVPKATAAHSVTVKLQYLFFLTVCGFDRVFLVKICKKKLLLKLLRGPRRKVLMVLWLPANQSLQKSQVFQWVLRTETYMEMHYGHQAPQVAMLPKLLCRQMLPTLSTLQQRHPQGPCPPPVTPLRVQSVLLLGVPQTAAFSGRILHQPEMAAMRLMPKFLNSTNSWWTVAPRCPRSAVDISPGPTSPSLASCASVAIGKLALLGASAPCGAAGAREAGRFAVLGTMVMKGAAAASCQSPPSPRETTPSSDATRRTRPIAAQSKKTMTAAGLTPRRNLQRNLKVLGAKKITFLRNSRRATPTSKGSLRRKYLRVNIRKLIWTKQRSFLSLFPKLRATEQMTNVGCLLKKSSQLRRSWRNVSRISNMEHRLTMDSALSLTKREGPETSEKKRKLPGYPYDVPDYAS

SEQ ID NO: 1186 - protein, 1750 aa, Artificial Sequence
  hINV- and HA-extended poly-FSP polypeptide 4D
MHRRRSRSCREDQKPVMDDQRDLISNNEQLPMLGRRPGAPESKCSRGALYTGFSILVTLLLAGQATTAYFLYQQQGRLDKLTVTSQNLQLENLRMKLPKPPKPVSKMRMATPLLMQALPMGALPQGPMQNATKYGNMTEDHVMHLLQNADPLKVYPPLKGSFPENLRHLKNTMETIDWKVFESWMHHWLLFEMSRHSLEQKPTDAPPKESLELEDPSSGLGVTKQDLGPVPMNRKTRKAAREKHRKTDDKKKKSTEKTKNAKKMPFQQRPPLQPVNLDLQHQRRRKKKKDKVEIRNRSPKANSTECQGEHSREQNLLNLVQLNPHSPHHRKDEEDHQKRHHHHNQKKMSVRASVSFWTLLPTTGVRTRGSPLRLTLWPPRVPPSPPLALGPRMQLCTQLARFFPITPPVWHILGPQRHTPQAPLRLWSWCGTSQTYFGSRPSPCLSWSSRIVAPGHALSCRTRRRWSSKRWIFSNQLTVQMLCLPITHPFASQPLGQEMPNNTQIRLLKPCRVNAVEELHSRRMSVRIVKNWVSCCYVRLSAVGLSTWSALDEEKKNGRISSLKKKVNACSSLILSFQRVKTGMEILLWILLKMEIQIFKICLGEMQLCGQAFGSFSADFSAPQIIKKMKKRIMVHELKKNLLLPMCSSLALPTGLTSLILPSSDLAVLISSSTSHFLMRSPVLPSSRLTCASPQLPRMWTWSSWLKNEGNNHWPRVEMPTGWLLVGYNTRNTAQNPRLQQHLKHWQQCTRARWCQEPCQTLTFFHFFFFFKTVSLCCPGWSKGQPPPPGLKPSSLASQVARTTGVYQHVWLICFVFFVCVETGFCHVAQVGLERLVSLSGITDVNHWAQPKPSPSKGTGMNRPIGLRVGKGVWARLILAMTLTLNGMAKKSQQPLQVVLRLGNLPPFFRGSEVPFPRPCRTKPACTSKAWTPRKLVGRAVRRKGSPLWDCSTTTGTHHGCLWEIPSVTLLAHPRTASITLPTTSLKGSRTSCCPRSHPRLPRTKWPLQCLLHSLGTTGTLVWERGVLQMRSLEAHCPLQTFHLHHCRTQPSSCPPAWILYQGQWSGAVVGLRPVAHHLPRPIQGLHCPQAPHQPALSWGKWPVGMTGPARCCRWPRRCQKKVPSASPWGLVLKKNRKQMLNQKCLAPFRESTLGNFWMKLLQLPVVINLKRLQKFNLHLCYYHSQSNRNKSRQMESLGMKLQSQKSQHHCALRKIEWATKLSLGGKAGPQAQEKATSRILNLQVLKKILRSFMKLYHSLVMCLRLRTKLEKALSALFIWPQHSYKPLFFHGDLCEWGGQAHRQRNWLKNWKRFKLKKKYIQKKKQKSNKIICKGHRITIICIKNMFLQRKGFLNLSHVEKFCRGGPSASDRCCSCSPSGFSAGRGRCPVQGCLRPHRVQLLRRWGPGSPAGQRLSKGFQLLRWWGPGSPAPEPRKGPFPPPDPPWPVTAVTVMAGSVPSAQSVDALESPGPLALEGPSSPRNLLWREMSIFLPGIFTAKKSPTSFCCNILNSLPSSMEIAVLQEDSKKMTQKGQAFGSLCQLVSADFSAPQVTRLRSLNHLLITYTPHICRHTLLTPDTRWIFSNQLQTVQMLCLPPLKQGERIIWPLGGFQIPNFFWSLGIGHTGAWWHTGRRRREWGGSTVSRSPLWISSMIYLRGMAFASDSSIRTTRVSWCRRCGAKSAAASSIEALTALFTCRTASISVNISTLMSILEALKKKPRDICRISCRCRREYRVTMGYPYDVPDYAS

SEQ ID NO: 1187 - DNA, 4641 bp, Artificial Sequence
  Polynucleotide encoding the hTPA- and HA-extended poly-FSP polypeptide 1C
atggatgcaatgaagagagggctctgctgtgtgctgctgctgtgtggagcagtcttcgtttcgcccagccaggaaatccatgcccgaagcaccagacgggaaatgccttctcaggccacaccttctccacctggaccttggagagccgctctgggcaaagaagtgaagcggagccagagcaagctgcggctgagaaacacaagccccaccgagatccaattgaccatgaacgacagcaagcacaagctggaaagccccgctctgaaacaggtgtcccctgcctctccacctacacagcagcctcagacaccccaggatagcagacaggtgctggccgcttcttctcctggacatcctcttggccctggcgactgccctagaacaatggctggaccttctgcctctctgcacccagcatctggcagagccagcagaaagacctggcagagaaggctgagagcctgtagagctggtggacctgctggatgggctagacaggccatgacactgaaggccctggtcaagacctggacacagttcagaaactaccccagagtcggagccggaacaggcggaggacctgcttgtgttcctgtggccgaagcttctactggcgcctggacagctgaaggcgctgccggaacaagatgcagagcttctagagccccttgcagacagctgcctgccagctctcctaccaagtgcgagatctgcgtgaagagaaggcggcggagaaagcggagcagccagtctagatctcccgtgcctaagaaacgcgagcggatgatgctgcctgtgcgggccagaacagctagatctgctctgccacaaggcagagcccctctggaaggaatgcttctgcctagagcactgcccagcctgctgagcagaatgccagccagaagagagagccggttttggctggcactgcaggctctgggactcagacctcctcatctgcctagctgtcaccctctgcctcaactgcttggacctcctccacctcatcaggcccctttcgacaagaaaggcttcgtgatcctgagcaagggcaagaagcgccggaaagaaatccggcggatgaccagacggaccatgaccaccaccaaaatgatgatgatgcggcggaccaagcggcggaggcgaaaacgtagaagaatgaccatgatgacccgcagaaccctgctgaccaagaaaacctgtctgacccctagaaccagcgccgccacaaaagctctgcccagacagacaatcagccagcggaggcctatccagacacctcctggaacaagcctggccatctggggcagactgcctctcagaccacagagaggacctcggcctctgcatagatggctgcagcagacaacaggctgctcccagagaagaatcgccaagaagcggatcaagctgaggcggaacacactggccatccggtttatctctgcccctcagcctagcagcagcaccgttacagctgctcctagcggccagtacttcagcagcttcttctacaccagcgaccggaccaagtgtgaaatctgtgtcaagaacaccgccatcctggctatcaccctgatcacccctcaggaccctcacctggaccctgtgtgtcacccacatagaaggcctggctggaagggccaccacagagtggtgtttagccaccatccaagcggctccaccaagagccattggcagcagagagaaagaggcggaggccgcagagaaaaaaagggctgcagagagatgcccagcagctggtctagctctggcagaaccgccgacaaaaagaacgtgcggagcagaaccagactgaccctgacaggcacaagaagcagcggcacaagagcctctccaagcgccgtgtgtctgtgctgttggacatgcccctccagaagcttccctgccgcatctccatctggactgagagcacctgttggagcccaggctcctcctgaagtgacactgagagccagctgtgcctctagcgcctctaaagcctgtgctggactttggccttggggagcccaagtgcggaacaaagtgcggcagaacttcaagcggaacctggccaaaaagaccctgactaacgccctgcggagtatgcccaagagcagaaaccaggtgctgttcagacggaatctgaccccaagccagctgagaactctggcccctccttacatgctgctgccccagtctctgtctcagagcctgtccagaaagcagatccccagccaatcaatgctcgtgaccgccttcttcctgctcgacatcatcctgagaagcctgctgtactcccggatgtgcctggtgcagatccctacacacacctgggagcccgactacttcgtgtccctgcctatgatgttcagctgggccactcagagctttccagtgggagccgtgttcctgaccagacctgccattccttgctgcagctgtaccagccacagcaacccttggagccagtccttcaagaagaagaagcccctgacattcagccccagcgtgccaatgtctctggcctgtagcatcaccgtgtccttcgtgggccagatcagcacactggtgctggacgtgtcctccatctctcactggcgcaagcgcaagagagagaagcggtcccagaagtcccggcagaaccatctgcagctgaagtcctgcagacggaagatcagcaactggtccaagctgagatccccgtggatcttctaccctcggctgaaaaccttcggcgtgccactgggctctatcctgtgtctggcaggctccctgagcacgatgatgatcattagcaccaccagacaagagtgtggcagacgggcctccgtgccttgtagacctatgatcggcagcgctagacccggaccttggcggacatctgctatgccatctgccatgggagtcgccctgcctaccagctgtgaaagcggaagatctcctcctgccaccggcggaagaatgcctggatctcagtctatcatgatgagctggatgcctccactggctccctgtgccgcttgtccttgttctcctgctcctacactgtgccctgctcatcctgcaagagcccctacagccgtgcctgcctttacacctctgtctgctcaccctgtgccagtgctgtctggatgtcacctggccgtgcgcacctctatgctgacactgctgcccatgagacaccctcacagaagcccacctacaagctgccctccactgctggaagctttcccactgccaagggccagcctgagagctaccgtgcctagacacagctctgtgctggccactggactgcatctgcatcggcagattagcctgcctctgaggggcttcctgctgcatcaacctctgcctggacaacacctgtggctgtcccacagactgaggctgagactgccaagaacaggcgagaagaacgacctccagctgttcgtgatgagcgacaccacatacaagatctactggacagtgatcctgctgaacccctgcggcaacctgcacctgaaaaccacatctctgcggagagccagacctacctcctgcagcacatgcagaatgtggtggctgaagctggccccactgcaagtgaccacaacactgaagctgatcctggtcatgctggaaatcgtgaccgaagaggccaagaaatccatgaagagatcccggcggagcaagatcgaggcctctcctatcggctccatcatgaagaagaaagacagcaccatcttcatcaaccagcagctcaagtggacccctcacatcctgaagtctgccagcgtgtccaagaagagactgcccaagctgaacggcatctgggaagtgatgccccggacactggaaggctgcatcagcgtgaaggaccaccggacaagccagaaccacagcaagtgcatcaccgagtgtgtgcggacagccctgaaccagagaaaggtggtcaagaaccccagccagccagtgccactgagaaacgacggcatcaccaacggcaacgactccaccagatcctgctccatcagcctgaagaaaagcctggaaaagatgcccctgatgaacgccaagaaaatggaagatatgatctgggagagcaacatgggcggcaaccggtccatctgcctgacaagactgccctgcaaagtgaccgagtccagccaaagaccacctcggagcattctgtccctggcctctagagccggacagtttcccgtttggcggagaaccagcagaggcatgtccctgcagtggaagtccggcaatgcctgcacacctctgaggtgccctagcagaagccctgccacatttctgaccgcactgaacggctggcacagatctggacttagggctcagcaacctagcctgccaggaccttgtgctagcctgctgtctacactgagccagcctccaccacaggctccaagccaagtttggacagccgccacactgagatgtcccgctgttcctgcagctgcttgccctcctatcgtgttctttctggccccatacttccccacaccactgagcatcagcagacccacctctcgggccagacagtcttgttgtctccccggactgacacaccctgctcaccagcctcttggctctatgggctacccctacgatgtccctgactatgcgtcc

SEQ ID NO: 1188 - DNA, 4623 bp, Artificial Sequence
  Polynucleotide encoding the hTPA- and HA-extended poly-FSP polypeptide 2C
atggatgcaatgaagagagggctctgctgtgtgctgctgctgtgtggagcagtcttcgtttcgcccagccaggaaatccatgcccgacggcagatcaacagacggaagctgcagagaaagaagcgccggaagaagagagaggaccactgcggactgcgggccagaaaccggaacatgaagaaaaccatgagccacctgatcgcccatcaggccctgaagatgtctggcctgagactgtttcaccccagactgctgacacggaagaagcctggcaagaaccctcggagaaagacctggaagatgcggaagaagtacgcccagaagcctagccagaagaaccacctgtacggcaagggcctgacacaccctgtgcctctgaagagaaccctgcagaacaagcggaacaagaacatcaagcgcgtgaaccagaagaagggcaacatcaagagaaagagcatcctgctgcacctcatcgtgctgaacagccccgagagcaacctgcaggctcatcctcaagttccagcactggctcctcaggcttggtggcctgctagaagaggccctctgacaagcgctccatctgctcagcagagcctgaccttcctgcctagcagatttccttggggccctcctccactgcactggaactctgcctacctgggcagaacactgctcgtgacctgcatcctgtaccacagatggatcgtgaccagcatgtgccagagccagagatggctgaccagcaccacctctagaagcagcgccctgatgtggacccagtggtctagcgtgacaagcctggaatggacagcccaagagaggggctgtagcagctggctgatgaagcagacctggatgaagtcttggagcctgcgggaccccagctacagatccatcctggaatacgtgtccaccagagtgctgtggatgcccacatctacagtgggagccctgagagccacagctcctgcaacagctgctccacaggctcagacccctcattggagagccgccacaacaagcagcatgagcagcagccctagagccgagcctacaagctctagctcttgggccacctgttggcccagatgttgcagctccagctgttactggtccctgtcctcttggcctcctgctggtgctgccgaggccacaaataccaggaccagaagcagagagtcccagcggggcagaatgctgacttggagaagcagcctgtggctgcagggcaccagatgttttacaggcgtgcggacctccagcagacacccttcttggccttggaccagatgcctgagaatgcggcctcctagaagcaacagccggaaaaagctgctcgaggacatgaagcaaaatggcttcacccggtacaagaaacggggcgtgatagcctggcggagagccactttcctgctggccctttgggagtgcagtctgccccaagctagactgtgcctgatcgtgtctaggaccctgctgctggtccagagcagatgcagcctgatggaacagatccctcacctgaagtcctggtggtgtacaagaggcggcggaaagcggaagaaaaagatgtgcaaggtgtccggcggctgcaccgcctgtgttgaaagatgtccttggaagggcatctgctggaagtggcctgtgacagtggccgctctgatcctgattcagcacggcggcatcttcaccttccggttctgggtcgagaagctgtcctggaacatctgcaagaatctgtccctgtacctggacaagttcgtgcagcggctgctgtacgtgtacatcatcgagacaaacgtgttcgtcctgaacctgttccacgtgccagtgaatcagatcttcatgatggccttctacctgaagtacaccgagaaggcctgggtcatggaactggaatggctcattcagcagcagtgctaccagttgctgctggctcatatgtacggcttcagcacctacggcacccagaaaggcgagtgcgtgtgtctgcagtgtctgagcggcagctccctgttcatcctgaagcagccactggacctgaagatcagcaagaccttcatgagcagatcccacctggatttcagcccctattggatgaagaaagtgaaggcctctccacagatcatgcagcggatgagcgccgtgaacttcgagacaatcaggcggaagtggcagatccggcacgtgctgaagaacctgcctctggaaaacacacagatccccaggacaagccctctgtggaagatcacaatggtgctgacataccccaactgcgtggtgcatgtgctgatgttcgtgctgttcaaggccgaccagagcgagtctagcctgagcagcggaatctaccctcctagcacctgtagcctgccttgccggggcattagaatgtgcgccctgtctcaccctagcttctacatcagcagcaccgtgtgctttctgagcaagcactgcatgaccgcctgcaccagagagaagatcatcaaccccaccatcagctgcccctttcagagccccacaaagagactgggccacagagagggcagcgagagcgataatctgggcctgctgtactcctttcctccttggctgcccatgagatccctgggcgaaccttggagagctggctttcagtggggagagtccccttggcaagtgatggctagcctgaccggcaacagcgtgatcgtgcacaagatcgtgctggtgtttctgaagtctctgagcagctacaactgcgagcggcggatctctggcatccagaagagagccatcgagttcgccgtcctgaagctgctgaacatggacctggctagccctcagattatgcagagaaccagcgccgaccggttccggatgaagcggagaatgcagaacctggataacctgggcgtgccctggccattgcttccaggtgctgctcctccacatagactgctgggcccctctagatggattctgtttcatgtgcggaacatcgtgtacggcatccaagtgatgctgtgccggcggagaaacagcagaaagcagagtcaggtgcagctggccattcaggtcctgctcgtggacaagcacaagtactttctgttcggcccctatcctatcagcgagggactgaccatgaccaccggccggaacatcaacagcaactccctgatgaccaactgcctgttcagccccatcttcctgtgccaccacgccatcatgcaccggaagatgacaagcccacacttcagactgttctccagcaagatcccacatcctcaggtgccaagtgtggtggccctgtgcaagttcctggccaatggcctgtggttcaacctgatctttcagaaaaagggccacatgatctttagccccaagttcttcctgacctttagccagcggaccctggaatccgccggactgtttccatggctgcacacccagtgccggaacaaaaagaccaagctgtggttttccctgatcaacatccaccaccgcaagaatcctctgctgcctatgagaatgagcagaacacctcctcggagagtgtgcggatctccacctctgcatctgtgccaacctctgagaggcggcaagaagagaagcaagttcgccttctggaagcctcctagccagggcatcagctcttgtctgatgacaggctgttggggctcctgtggcagagcttgttcttgcggaagaggctgcggtacacccagaggcgactggaaaagacacccacctcgcagagagctgagcctggaaccatggattccttatctgcaccagcaaaagacccagcggaagcggatgaagaccggcgccattcaagagaagggcgctatccaagaaaaaggcgcaatgaccaagcggatctgcgtggtcaatttcgaggcctgcagagagatggaaagcctgagcgcccctgagaagattaccctgttcgaagcccacatggcccggtgcacctccatcaatgtgctgtgtgtccgggccagcctgattgagaagctgatgaaagaaaagcgcaagatgaagcgcaaccaggtggcatcccctcaaatcatgcaacggctgttcatcaagggctaccagaacaaccacttcacgttccacctccaaaactttgccttcttcagctccttcggcaacaacaagtatatcaacattctcacccgggccttcatccacacacctagaagccctggctgttccgtgtacgccaatatgtgctggcggaagatgcagtccctgaatcaccccagcagactgaccaactgtcaccccgcttggctgagccccattagtgcttgtcctaggctgctgccctatccttttcacgtgctggcactggaagtgacctttccacctggcacagccatgcctcagatgcaattgcaggcactggctatgtgggagaaaggctgggacaagcaagagaagaaatcccgcaagctgatgtcctcctgcctggaaaaaaaggctacctggatgcggagaacccctggcacaagcctgcagtgttacctgaacacacacccctgcaccatgctgctgcctcagggaatcccatctctgaacgcccagtggatgttcctgcggatcggctacccctacgatgtccctgactatgcgtcc

SEQ ID NO: 1189 - DNA, 4638 bp, Artificial Sequence
  Polynucleotide encoding the hTPA- and HA-extended poly-FSP polypeptide 3C
atggatgcaatgaagagagggctctgctgtgtgctgctgctgtgtggagcagtcttcgtttcgcccagccaggaaatccatgcccgacctattcctccacacctgagacaccctctgctgctgaagaacaagaagcggagaaagctgcggcccaagagcagaaagaagggccacaccaagaaccggcggaaggccaagagaaagccccagatcagaaacagccgcagagccacacctaccagcaagggcagcctgagaagaaagtacctgagagtgggagccgccgctgctagctgtcaatctcctccatctcctagagagacaacccctagcagcgacgccaccagaagaaccagacctatcgccgctcagagcaagaaaaccatgacagccgccggactgacccctagccagaagaaagatcctgccggcaagctgaagaaacaggtgtccgtgtacagcggcaacctgctgagcttctctcggagaggcatgaagtctagcgtgcgcctgaagaactgcaccaacctgagcgtgcccatgatgctgaccatcctgatctggaagcgggtgttcatcctgctgctgtccgacaagaaatctatccctcacgtgcccaaggccaccgccgctcattctgtgacagtgaagctgcagagccggcggaacagacggtacagaaagatctatggcgagctgaagatgtccctgcaggccagcaatggcatggaagcctgtggcacacaccccacacctagactgtccgtgtccgtgatcaccatgaagctgtgggagaagcacttcaagggcctgaactggaacctggtcgtgtggattctgaacctgaagatgatgctcaagaagaagtatctggtccagcgcgagtgggagaaacggaagcagattcttggcggcggaggcaagtacaaagagtacttcctgaagagaatcctcatccgcaaggccatgacagtgctggccggcgataagaaaggcctgggcagattcatgagatgcgtgcagagcgagacaaaggccgtcagtctgcagctgcctctgggcagaatggacctggatggaatgctgaccgtgatcggccagggactcgtgggcatgacacctagagatctgggaacagtggctggcgccaccgcacagattcagaggcctattcaggtgcagacaggcggcagactgagaggccctagaagaaaggtgctgatggtgctgtggctgcccgccaatcagagcctgcagaaaagccaggtgttccagtgggtgctgagaaccgagctgcccctgacctttagcaccctgctgtgggacagcagacacgacctgcctagaatgctgcccatcagcagccctctgcacagaccccagatgcctttctggacctgcacctttcctgccaccacatggggcacatgggagacaccttctacatggggctggcggacctttgccagacagccttctagacccaccggcagaacccctaccaccagactgatggctccagtgggcagcgtgatgagctgtagcctgctgacacagccatctccagccagcgcctgtacaatgcctccactgctgcatcctcagtgggcccctcattctgctggactttctccaggcgcttgcagacctgcctgtacctgcatcagcatgaccacaatcagcagggccacctggcgcagaaacctgcagagaaacctgaaagtgctgcggctgagaatccccagcctgcggaagtacagacagcagaacacccggtccaccaacctcgagaagaacccatctctgaagaagcagagccagaggcggggcaagctgtctctgaccacactgagcttcgtgctgatcgaggaactgctgaaaaagagcagccagctgcggagaagctggcggaacgtgtccagaatcagcaacatccggaagctgatttggaccaagcagcggagcttcctgtctctgttccccaagctgagagccaccgagcagatgaccaatgtgggctgtagactggattttcaccccagaagcagctccggcgacagagtgttcctggtcaagatccagagcagcccattcctggccagatcctggaataccatgcagtggaacaacaagaaaatggccatgactgtgatcgctggcgcccaccactgtcagtacaagctgacctacaccaaagtgtggaagatgaattggaagaaaatgatgatcggcagccagcacctcctgttctccccactggatagctctccactccagctgctgctgcacccacacggcaagagatgcaacccctgttgtcggctgacatggatgagccacctgaatcggaagctgcacctcaccaggtcctgcctgatcgacctgaccatgatgatgagccagaaactgtggaagaatcagcggaagcgcatccctctgccttctccaagacagcatctgctgcctcagtatcctctgcaccctcctccaccttgtctgctgcttctccaccatagacaccacctggcattcctcgagatggcctgtagctctcagcacacccacagcatcaagatctggatcagcttcagccacgagacaatgagcctgtccaacatcctgatgaagttccggctgaccaccaccacaagcagccccagaagaagccctgctctgcgagctagaggcggcacaacaatcggcgaagtgaccagcagcctgttctttagccactgcctgtgcgtggcccctagatgtcctagatctgccgtggacatcagccccggacctacatctccttctctggcctcttgtgcctctgtggccattggaaagctggcactgcttggcgcctctgctccttgtggtgctgctggcgctagagaggccggaagatttgctgtgctgggcaccatggtcatgaagaacatggaacacagactgaccatggacagcgccctgagcctgacaaagagagagggccctgaaacaggccccgtgtactacgtgtgcaaccggatgaatgtgtccagcgtgctgaagcctttcctgttcaccgtgcctatcgaggacatgagagagtgcaccctgggacgcaacagaatgaatgtctcttccgtgctgaaaccctgtctgatccccgtgccaatctgcaagaagaaactgctgctcaagctgctgaggggcgcctccagctctaccagcagagatagcagaagctttttcaccagcgctcaccccagcagaccctgcaggatgagactgtaccagatgctgcagaagcagtgctgctacaacctcgtgatcaagcaccctctgatcttccggatcaacctgcggagacagggcaagaccaaagacggcgttgtgcagagcctgggcttcctgaaccagcagatcatcctccagaaagagttcttcatctgcctgctgatgttcatcaagcggtggaagccagccgccaccaagaagggcaagaacagcccctgctgccagaaaaaactgcgggtgcagaaccagggccatctgctgatgattctgctgcacaacagaggcccacctctgcataccagattcgagaaaaagcggcccgagtggctgagcagaaaatccggcgtgatgaagtgctgggatctgtgccctgccttcagcggcaggattctgcaccagccagaaatggccgccatgagactgatgcccaagttcctgaactccaccaacagctggtggacagtgcacaagaagagaggcctgttccaccagatgaagtgtctgaccgccgtggactgtctgcaggccttctgggatatgagcgagaagaaacgcaagctgcctatgattcgcaaaatccagaagcggcggagaaccgccaaccggaacatcgagatcacccctcagagaagcaaagcccacctgaagaaaacctccgccaagggcgccaagaaaatcaccttcctgtgcctgagagtcagatgcggaggctggctgtgtggctggacaccaagaggatggctgaagaagtccaccaagtccagactgtgcttcttctacctgctgtactacctgtttttcctgaccgtgtgcggcttcacccctccaccacttattctgtggcctcaggcagcccctggcgagaagctgaagcactgttttaaagcctggggcgtcgaccctcctggcagcgtttggattctgccctgcttcctgattcacctgagaaaggtggacacccaccacctccaggtggtcaccaaaacagtgaccgccacaacagccgacggccagaggatgagaaggctgaagtgcaaggcctgccggctgagatgggctagacctgaacctgcagctcaggcccctcctaagagccactttccacctcatcctagcggcccctccagaaccagctctctgcaattgagaacctacatggaaatgcactacggccatcaggccccacaggtggcaatgctgcctaaactgctgtgtcggcagatgctccccactctgtctaccctgcagcagagacatcctcagggcccatgtcctcctccagtgacacctctgagagtgcagtctgtgctgctgctcggagtgcctcaaacagctggctacccctacgatgtccctgactatgcgtcc

SEQ ID NO: 1190 - DNA, 4641 bp, Artificial Sequence
  Polynucleotide encoding the hTPA- and HA-extended poly-FSP polypeptide 4C
atggatgcaatgaagagagggctctgctgtgtgctgctgctgtgtggagcagtcttcgtttcgcccagccaggaaatccatgcccgagacagcaagaagatgacccagaagaaccgcaagacccggaaggccgccagagagaagcacagaaagaccgacaacctggacctgcagcaccagcgcagacgcaaaaagaagaaggacaaggtcgagatccggaatcggagccctaaggccaatagcaccgagtgtcagggcgagcacagcagagagcagaacctgctgaacctggtgcaattgaaccctcacagccctcaccaccggaaggacgaggaagatcaccagaagagacaccaccaccacaatcaaaagaagatgtccgtcaacgagggcaacaaccactggcctagagtggaaatgcctaccggctggctgctcgtgggctacaacaccagaaacacagcccagaatcctcggctgcagcagcacctgaaacactggcagcagtgcaccagagccagatggtgtcaagagccctgtcagaccctgaccttcttccacttcttcttctttttcaaaacggtgtccctgtgctgccccggctggtctaaaggacaacctcctccacctggcctgaagccttctagcctggcttctcaggtggccagaaccacaggcgtgtaccagcacgtgtggctgatctgcttcgtgtttttcgtgtgcgtggaaaccggcttctgtcacgtggcccaagtgggactcgagagactcgttagcctgagcggcatcaccgacgtgaaccattgggcccagcctaagccatctcctagcaaaggcaccggcatgaacagacccatcggcctgagagttggcaaaggcgtgtgggctagactgtggctgaagaactggaagcggttcaagctcaaaaagaaatacacaggcatggaaatcctgctgtggattctgctgaagatggaaattcagatcttcaagatttgcctgggcgagatgcagctgtgcctcaagaagaaagtcaacgcctgcagcaacgccaagaaaatgcccttccagtgccggtgcagacgcgagtacagagtgaccatgattcagaagaagaaacagaagtccccgctgttcttccacggcgacctgtgcagaccttctccttgcctgtcttggagcagcaggatcgtggctcctggacacgccctgagctgtcggactcgtagaagatggtccagcaagatggccaagaagtcccagcagcctctgtgtagaggcggcccttctgccagcgatagatgctgtagctgtagccccagcggctttagcgctggaagaggcagatgtcctgtgcagggatgtctgaggccacacagagttcagctgctgagaagatggggccctggatctcctgctggccagagactgtctaagggcttccaactgctgcgttggtggggaccaggatctccagctcctgagcctagaaagggcccatttccaccacctgatcctccatggcctgtgaccgctgtgacagtgatggctggctctgtgcctagcgctcagtctgtggatgctctggaatcccctggacctctggctctcgaaggccctagcagccctagaaacctgctctggcgggaaatgagcatcttcctgcctggcatcttcaacctgcacctgtgctactaccacagccagagcaaccggaacaagagccggcagatggaatccctgggcatgaagctgcagatcacacacccattcgccagccagccactgggccaagagatgcccaacaacacccagatcagactgctgaagcccggccaggcctttggcagcttttccgccgatttttcagcccctcagcaggcccctctgagactgtggtcttggtgcggcacaagccagacctacttcggctctatcgaagccctgacagccctgttcacctgtagaaccgccagcatcagcgtgaacatcagcaccctgatgagcatcctggaagccatcctggccatgacactgaccctgaatggcagccctctgtgggactgcagcacaacaacaggcacacaccacggctgcctgtgggagatcccttctgttaccctgctggctaccgccaaaaagagccctaccagcttctgctgtcagcggcctcctctgcagccagtggaagagaagaagaacggccggatcagcagcgtgccaccttctccacctcttgctctgggccctagaatgcagctctgcacccagctggcccggttcttccctattacacctcctgtgtggcacatcctgggacctcagagacacacccctctgctgacccctgacaccagatggatcttctccaaccagctgcagaccgtgcagatgctgtgtctgcctccactgaagcagggcgagagaatcatctggcctctcggcggctttcagatccccaacttcttttggagcctcggcatcggacacactggcgcctggtggcatactggaaggcggagaagagaatggggcggcagcaccgtgtctagaagcccactgtggatcagctccatgatctacctgagaggcatggccttcgcctccgacagcagcatcagaaccaccagagtgtcctggtgtcggagatgtggcgccaaaagcgccgcagccagcagcgacaagaagaagaaaagcaccgaaaagaccaagaacaagatcatctgcaagggccacagaatcacccaggtggtgctgagactgggcaacctgcctccattcttcagaggcagcgaggtgccctttcctagaccttgccggaccaagtgccagaagaaggttccaagcgcctctccttggggactgcacccaagaacagcctccatcacactgcctaccaccagcctgaagggcagcagaacaagctgctgccccagatctcaccccagactgcccagaacaaagtggcctctgcagtgcctgctgcacagcctgggaacaactggaacactcgtgtgggaaaggggcgtgctgcagatgagaagtctggaagctcactgccctctgcagacattccacctccaccactgcagaacccagcctagctcttgtcctccagcctggattctgtaccaaggacagtggagcggagccgtcgtgggacttagacctgtggctcaccatctgccaagacctatccaggggctgcactgtcctcaggctcctcatcaaccagctctgtcctggggaaagtggcccgtgggaatgacaggacccgccagatgttgccggtggcctagaagaatgtgtagctctctggccctgccaaccggcctgacatctctgatcctgcctagcagtgatctggccgtgctgatctctagctccaccagccactttctgatgcggagcccagtgctgccaagcagcagactgacatgtgcctctccacagctgcctcggatgtggacatggtctagctggctgaaagagtggggaggacaggcccacagacagcggaactgtagagtgaacgccgttgaggaactgcacagcaggcggatgtctgtgcggatcgtgaagaattgggtgtcctgctgttacgtgcggctgagtgcagtgggactgtctacttggagcgccctggattccctgatcctgtccttccagagagtgaaaaccagccggatactgaacctccaggtgctgaagaagatcctgcggagctttatgaagctgtaccactctctcgtgatgtgcctgcggctgcggaccaagctggaaaaagctctgagcgctctgtttatctggccccagcacagctacaaaggccaggcattcggaagcctgtgccagctggtgtctgccgatttcagcgcccctcaagtgaccagactgcggagcctgaaccatctgctgattcggtggatctttagcaatcagctgacagtccaaatgctctgcctgccgatcatcaagaaaatgaagaaacggatcatggtgcacgtcttgaagaagaatcggaagcagattatctgtatcaagaatatgttcctgcagcggaagggattcctgaacctgagccacgtggaaaagttcagagagagcaccctgggcaatttctggatgaagctcctgcagctgccaccagcttgcacctctaaggcctggacacccagaaagcttgtggggagagccgtgcggagaaagggcgtcgtgatcaacctgaagagactgcagaaattccgggctagcgtgtccttctggactctgctgcctacaacaggcgtgcggacaagaggctctccactgagactgactctgtggcctccaagaagccagaaaagccagcaccactgcgccctgagaaagatcgagtgggccacaaagctgtccctcggcggcaaagcaggaccacaggctcaagagaaggccaacatcctgaacagcctgccttcctctatggaaatcgccgtgctgcaagaaatgctgaaccagaagtgtctggcccctttcgagcttaagaagaacctcctgctgccaacctacacaccccacatctgtcggcacacccttaaaaagaagcccagagacatctgcagaatcagcggctacccctacgatgtccctgactatgcgtcc

SEQ ID NO: 1191 - DNA, 4641 bp, Artificial Sequence
  Polynucleotide encoding the hTPA- and HA-extended poly-FSP polypeptide 1D
atggatgcaatgaagagagggctctgctgtgtgctgctgctgtgtggagcagtcttcgtttcgcccagccaggaaatccatgcccgagccgacaagaaaaacgtgcggagcgctagttctcctggacatcctcttggccccagaagaatgaccagacggaccatgaccaccaccaaaatgatgatgatgcggcggaccaagcggcggagaagaaaaagacgccggatgaccatgatgaccagaagaaccctgctgaccaagaaaacctgtctgacccctagaaccagcgccgccacaaaagctctgcccagacagacaatcagccagcggaggcctatccagacacctcctggaacaagcctggccatctggggcagaagaagcaagatcgaggcctctcctatcggcagcatcacccctctgagcatcagcagacctaccagcagagccagacagagctgttgcctgcctggactgacacaccctgctcatcagcctctgggctctatggttggagctggaacaggcggaggacctgcttgtgtgcctgtggccgaagcttctacaggcgcttggacagctgaaggcgctgccggcacaagatgtagagccagcagagccccttgcagacagctgcctgcttctagccctaccaagtgcgagatctgcgtgaagagaagaaggcggcgcaagcggagcagccagtctagatctcccgtgcctaagaaacgcgagcggatgatgctccctgtgcgggccagaacagctagatctgctctgccacaaggcagggctcctctggaaggaatgcttctgcctagagcactgcccagcctgctgagcagaatgcctgccagaagagagagcagattctggctggccctgcaggcccttggactcagacctcctcatctgcctagctgtcaccctctgcctcaactgcttggacctcctccacctcatcaggcccctggcgagaaaaacgacctgcagctgttcgtgatgagcgacaccacctacaagatctactggaccgtgatcctgctgaacccctgcggcaacctgcacctgaaaaccaccagcctgaacgccaagaaaatggaagatatgatctgggagagcaaccagcagctgaagtggacccctcacatcctgaagtccgcctctatcgccaagaagcggatcaagctgcggcggaacagcaccagacgggaaatgccttctcaggccacaccttctccacctggaccttggagagccgctctgggcaaagaagtgaagcggagccagagcaagctgagactgagaaacacaagccccttcgacaaaaagggctttgtgatcctgagcaacatgggcggcaaccggtctatctgcctgaccatcgtgttctttctggccccttacttccccatgcctagcagctggtctagcagcggcagaaccagactgcctctgaggccacagagaggccctagacctctgcatagatggctgcagcagaccaccggctgctctcagagaagaggcgactgcccaagaaccatggccggaccatctgcttctctgcaccctgcatctggcagagcctccagaaagacctggcagagaaggctgagagcctgtagagcaggcggacctgctggatgggctagacaggccagaaaacgcaagagagagaagcggtcccagaagtccagacagaaccatctgcagctgaaaagctgcagacggaagatcagcaactggtctaagctgcggagcccctggatcttcgaggccaaaaagagcatgaagagatcccagcggcctcctcggagcatcctgagcctgttcaagaagaagaagcccctgacattcagccccagcgtgtccaagaagaggctgcctaagctgaagggcaagaaacgccggaaagaaatccagcggaaggtggtcaagaaccccagccagcctgtgccactgagaaatgacggcatcaccaacggcaacgacagcacccggtcttgcagcatcagcctgaagaaaagcctggaaaagatgcccctgatgcggagcctgctgtactccagaatgtgcctggtgcagatccccacacacacctgggagcccgactactttgtgtccctgcctatgatgttcagctgggccacacagagctttccagtgggcgccgtgtttctgaccagacctgccattccttgctgtagctgtaccagccactccaatccttggagccagtccacactggccatccggtttatctctgcccctcagccaagcagcagcaccgttacagctgctcctagcggccagtattttgccctgcggagtatgcccaagagccggaaccaggtgctgtttcggagaaatctgaccccaagccagctgcggacactggcccctccatatatgctgctgcctcagtctctgtcccagagcctgtctcggaagcagatcccatctcagtccatgctcgtgcggaccaggctgacactgacaggcactagaagctccggcaccagagcctctccatctgccgtgtgtctgtgctgctggacatgccccagcagaagctttcctgccgcctctccaagcggactgagagcacctgttggagcacaggctcctccagaagtgacactgagagccagctgtgccagctccgccagcaaagcttgtgcaggactttggccttggggagcccaagtgcggatgaagaagaaggacagcaccatcttcatctaccccaggctgaaaaccttcggcgtgccactgggcagcattctgtgtctggctggaagcctgagcacgatgatgatcattagcaccaccagacaagagtgcggcagacgggccagcgtgccctgtagacctatgatcggaagcgccagacctggaccatggcggacaagtgctatgccttctgccatgggagtcgccctgcctaccagctgtgaaagcggaagatctcctcctgccaccggcggaagaatgccaggatctcagtctatcatgatgagctggatgcctccactggctccctgcgctgcttgtccttgttctcctgctcctacactgtgccctgctcaccctgctagagcaccaacagccgtgcctgcctttacacccctgtctgctcatcctgtgccagtgctgtctggatgtcacctggctgtgcggacctccatgcttaccttgctgccaatgatgaccctgaaggccctggtcaagacatggacccagttcagaaactaccccagacggcaccctcacagaagcccaccaacaagctgtcctccactgctcgaggcctttccactgccaagagccagcctgagagctaccgtgcctagacactctagcgtgctggccacaggactgcatctgcataggcagattagcctgcctctgcggggcttcctgctgcatcaaccactgccaggacaacacctgtggctgtcccacagactgagactgcggctgcctagaacaaccgagatccagctgaccatgaacgactccaagcacaagctggaaagccccgctctgaaacaggtgtccccagctagtcctcctacacagcagcctcagacaccccaggattctagacaggtgctggccgtgcctatgagcctggcctgtagcatcaccgtgtccttcgtgggccagatctctaccctggtgctggacgtgtcctccatcagccactggaacggcatctgggaagtgatgcccagaacactggaaggctgcatctccgtgaaggaccaccggacatcccagaaccacagcaagtgcatcaccgagtgtgtgcggacagccctgaacaccaagtgtgaaatttgtgtgaagaacaccgccatcctggctatcaccctgatcaccccacaggaccctcacctggaccctgtgtgtcatccccatagaaggcccggctggaagggacaccacagagtggtgtttagccaccatccttccggcagcaccaagtctcactggcagcagagagaaagaggcggaggccgcagagaaaagaagggctgtagagaggcaagcagagccggccagtttcctgtgtggcggagaacatctagaggcatgtccctgcagtggaagtccggcaatgcctgcacacctctgagatgtcccagcagatctccagccaccttcctgactgccctgaacggctggcatagatctggactgagggcccagaccgccttctttctgctggacatcatcctgcggagagcccggcctacaagctgcagcacatgtagaatgtggtggcggctgccctgcaaagtgaccgaaagctccctggccaagaaaaccctgaccaatcagcctagcttgcccggaccttgtgctagcctgctgtctacactgagccagccaccacctcaggctcctagccaagtttggacagccgctacactgcggtgtcctgctgtgcctgctgctgcatgtccacctctgaagctggctccactgcaagtgaccacaacactgaagctgatcctggtcatgctggaaatcgtgaccgagaacaaagttcggcagaacttcaagcggaactccagcttcttctacaccagcgacagaggctacccctacgatgtccctgactatgcgtcc

SEQ ID NO: 1192 - DNA, 4623 bp, Artificial Sequence
  Polynucleotide encoding the hTPA- and HA-extended poly-FSP polypeptide 2D
atggatgcaatgaagagagggctctgctgtgtgctgctgctgtgtggagcagtcttcgtttcgcccagccaggaaatccatgcccgacggaagatgcagagcctgaatcaccccagcagactgaccaacaatcctcggagaaagacctggaagatgcggaagaagtacgcccagaagcctagccagaagaaccacctgtaccggcagatcaaccggcgcaagctgcagagaaagaagtccagaagccacctggacttcagcccctactggatgaagaaagtgaagcgggccagaaaccggaacatgaagaaaaccatgagccacctgatcgcccatcaggccctgaagatgtctggcctgagactgtttcaccccagactgctgaccagaaagaagcccggcaagcagaaaaagggccacatgatcttcagccggcggaagtggcagatccggcacgtgctgaagaatctgatccccagcctgaacgcccagtggatgttcctgagaatcgctagcccacagatcatgcagagaaccagcgccgaccggttccggatgaagcggagaatgcagaacctggacaatctgggcgtgccctggcctctgttgcctggattgctgctggcccatatgtacggcttcagcacctacggcacccagaaaggcgagtgcgtgtgtctgcagtgtctgagcggcagcagcctgttcatcctgaagcagcccctggacctgaagatctccaagaccttcatggccagccctcagattatgcagcggatgagcgccgtgaacttcgagacaatcctgcaggcccatcctcaggtgccagctcttgctcctcaagcttggtggcccgctagaagaggccctctgacatctgctccaagcgcacagcagtccctgacacggacactggaaagcgccggactgtttccttggctgcacacccagtgccgggccttcattcacacacctagaagccctggctgcagcgtgtacgccaacatgtgctggcggtacaagaaacggggagtgatcgcctggcggatctaccctcctagcacatgcagcctgccttgcagaggcctgatcctgattcagcacggcggcatcttcaccttccggttctgggtcgagaagctgagctggaacatctgcaagaacctgagcctgtacctggataagttcgtgcagcggctgctgtacgtgtacatcatcgagacaaacgtgttcgtgctgaacctgttccacgtgccagtgaaccagatcttcatgatggccttctacctgaagtacaccgagaaggcctgggtcatggaactggaatggctgatccagcagcagtgctaccagcggaagagaatgaagaccggcgccatccaagagaagggcgctattcaagagaaaggggccatgaccaagcggatctgcgtggtcaatttcgaggcctgcagagagatggaaagcctgagcgcccctgagaagatcaccctgtttgaagcccacatggcccggtgcaccagcatcaatgtgctgtgtgtcagggccagcctgatcgagaaactgatgaaagaaaagcgcaagatgaagcgcaaccaggtggcatcccctcaaatcatgcaacggctgttcatcaagggctaccagaacaaccacttcacgttccacctccaaaacttcgccttcttcagctccttcggcaacaacaagtatatcaacatcctgacctttctgcccagcagattcccttggggacctcctccactgggagcccttagagctacagctcctgctacagctgctccccaggcacagacacctcattggagagccgccaccacaagcagcatgagcagctctccaagagccgagcctaccagctctagctcttgggccacttgctggcctagatgctgcagctccagctgctattggagcctgtctagctggcctcctgctggcgctgccgaagccacaaataccagaaccagaagccgcgagagccagcggggaagaatgctgacttggagaagctccctgtggctgcagggcaccagatgttttacaggcgtgcggaccagctccaggtgcagcctgatggaacagatccctcacctgaagtctaacagccggaagaaactgctcgaggacatgaagcagaacggcttcaccagacggcggaacagcagaaagcagagccaagtgcagctggccatccaggtgctgctggtggacaagcacaagtactttctgttcggcagagccacatttctgctggctctgtgggagtgtagcctgcctcaggctagactgtgcctgatcgtgtctagaaccctgctgctcgtgcagtctagacacccaagctggccttggaccagatgcctgagaatgcggcctccacgcagccactggaactctgcctacctggggagaacactgctcgtgacctgcatcctgtaccacagatggatcgtgaccagcatgtgccagagccagagatggctgacctccaccacctctagaagctctgccctgatgtggacctggtggtgtacaagaggtggcggcaagcggaagaaaaagatgtgcaaggtgtccggcggctgcaccgcctgtgttgaaagatgtccttggaagggcatctgttggaagtggcctgtgacagtggccgccatgagcagaacacctccaagacgcgtgtgcggccacagagagggcagcgagtctgataatctgggcctgctgtactcctttccacctgtgctgttcaaggccgaccagagcgaaagctctctgagcagcggcaacagcgtgatcgtgcacaagatcgtgctggtgttcctgaagtccctgagcagctacaactgcgagagaagaatcagcggcatccagaagagagccatcgagttcgccgtcctgaagctgctgaacatggacctcggcaagggactgacacaccccgtgcctctgaagaggaccctgcagaacaagcggaacaagaacatcaagcgggtcaaccagaagaagggcaacatcaagaggaagtccatcctgctgcatctgattgtgctgaacagccccgagagcaaccgggaaaagatcatcaaccccaccatcagctgcccctttcagagccccacaaagagactgggaagccctcctctgcacctgtgtcagcctctgaggccctatcctatcagcgagggcctgaccatgaccaccggcagaaacatcaacagcaactccctgatgaccaactgcctgttcagccccatcttcctgtgccaccacgccatcatgcaccggaagatgacaagccctcacttcagactgttctccagcaagatcccacatccacaggtcccaagtgtggtggccctgtgcaagtttacacacccctgcaccatgctgctgccccaaggcgctttttggaagcctcctagccagggcatctccagctgtctgatgacaggctgttggcagtggtccagcgtgacaagcctggaatggacagcccaagagagaggctgttcctcctggctgatgaagcaaacatggatgaagtcttggtccctgcgggaccccagctacagatccatcctggaatacgtgtccacacgggtgctgtggatgcccacctctaccgtgcctaagttctttctgaccttcagccagatccggatgtgcgccctgtctcaccctagcttctacatcagctccaccgtgtgctttctgagcaagcactgcatgaccgcctgcacacctggaaccagcctgcagtgttacctgaacctggccaacggcctgtggttcaacctgatcttccggaacaaaaagaccaagctgtggttctccctgattaacatccaccaccgcaagaacccactgctgcccatgcggctggaaaaaaaggccacttggatgcggcggaccgagctgtctctggaaccttggattccttacctgcatcagcagaaaacccagtggctccccatgagaagcctgggcgagccttggcgagctggatttcagtggggagagtctccctggcaagtgatggcctctctgacaggcagacgcaagaaaagagaggatcactgcggactgcaagagaaaaaaagccggaagctgatgtccagctgcgccgctcctccacatagactgctgggacctagcagatggggaagctgtgggagagcctgttcttgtggcagaggctgtggaacccctagaggcgactggaagagacacccacctcggcggattctgtttcacgtgcggaacatcgtgtacggaatccaagtgatgctgtgctgtcaccccgcctggctgtctccaatcagcgcttgtcctcgcctgctgccttatccattccacgttctggccctggaagtgacattccctccaggcactgccatgcctcagatgcaattgcaggcactggcaatgtgggagaaaggctgggacaagcctctggaaaacacacagatccccaggacaagcccactgtggaagatcacaatggtgctgacataccccaactgcgtggtgcacgtcctgatgttcggcggcaagaagcggagcaagttcggctacccctacgatgtccctgactatgcgtcc

SEQ ID NO: 1193 - DNA, 4638 bp, Artificial Sequence
  Polynucleotide encoding the hTPA- and HA-extended poly-FSP polypeptide 3D
atggatgcaatgaagagagggctctgctgtgtgctgctgctgtgtggagcagtcttcgtttcgcccagccaggaaatccatgcccgacagaacaccagaagcaccaacctggaaaagaaccccagcctgaagaagcagagccagcggagaggaaagctgagcagcagaaagaagggccacaccaagaaccggcggaaggccaagagaaagccccagatcagccagaagaaggaccctgccggcaagctgaagaaacacctgaaccggaagctgcacctgaccagatcctgcctgatcgacctgaccatgatgatgagccagaagctgtggaagaaccagcgcaagagaatccctctgccttctccacggcagcatctgctgcctcagtatccactgcatcctccacctccatgcctgctgctgctccaccacagacaccatctggcctttctcgagatggcctgcagcagccagcacacccacagcatcaagatctggatcagcttcagccacgaggacctgcctagaatgctgcccatcagcagccctctgcacagaccccagatgcctttctggacctgcacctttcctgccaccacatggggcacatgggagacaccttctacatggggctggcggacattcggccctgtgtactacgtgtgcaaccggatgaacgtgtccagcgtgctgaagcctttcctgttcaccgtgcctatcgaggacatgagagagtgcaccctgggcagaaacagaatgaatgtgtcctctgtgctgaaaccctgtctgatccccgtgccaatcctgaccacactgagcttcgtgctgatcgaggaaagccggcggaacagacggtacagaaagatctacggggagctgaagatgtccctgcaggccctgcctctgacctttagcacactgctgtgggacagcagacacaccaccaccacaagcagccccagaagatcccctgctctgagagctagaggcggcaccacaatcggcgaagtgacaagcagaggcgccagcagctctaccagcagagacagcagaagctttttcaccagcgctcaccccagcagaccctgcagaatgagactgtaccagagcaacggcatggaagcctgcggcacacaccctacacctagactgtctagaggccctccactgcacaccagaaccatgagcctgagcaacatcctgatgaagttccggctgatgctgcagaagcagtgctgctacaacctcgtgatcaagcaccctctgatcttccggatcaacctgcggagacagggcaagaccaaagacggcgttgtgcagagcctgggcttcctgaaccagcagatcatcctgcagaaagagttcttcatctgcctgctgatgttcatcaagcggtggaagccagccgccacaaagacacctccaccactgattctgtggcctcaggccgctcctgtgcacaagaagagaggcctgttcagcctgttcttctcccactgcctgtgccaccagatgaagtgcctgaccgccgtggattgtctgcaggccttctgggacatgatgattcgcaagatccagaagcggcggagaaccgccaaccggctgaaaaagaaatacctggtgcagtgtaccaacctgagcgtgcccatgatgctgaccatcctgatctggaagcgggtgttcatcctcctgctgagcgacaagaagtgtctgagagtcagatgcggcggatggctgtgtggctggacacctagaggcaagaacaagaagcggagaaagctgcggcccaagcacctgaagaaaaccagcgccaaggtgtccgtgatcaccatgaagctctgggagaagcacttcaagggcctgaactggaacctggtcgtgtggattctgaacctgaagatgatgtggctcaagaagtccaccaagagcagacagagcagcccattcctggctcggagctggaataccatgcaatggaacaacaagaaaatggccatgaccgtgatcgctggcgcccaccactgtcagtacaagctgacctacaccaaagtgtggaagatgaattggaagaaaatgatgatcggctcccagcacctcctgtttagcccactggattcaagcccactgcagttgctgctgcaccctcacggcaagagatgcaacccttgctgcagactgacctggatgagcagagagtgggaaaagcggaagcagatcctcggcggaggcggcaagtacaaagagtacttcctgaagcggattctcatccggaaggctatgacagtgctggccggcgataagaaaggcctgggaagattcatgagatgcgtgcagagcgagacaaaggccgtgtctctgcagctgcctctcggccgaagaaagtccggcgtgatgaagtgttgggatctgtgccccagactggactttcaccccagatctagctctggcggcgagaagctgaagcactgtttcaaagcctggggcctgtgcttcttctacctgctgtacttcgagaagaaacggcccgagtggctgagcgttgaccctcctggatctgtctggattctgccctgcatggacctggacggaatgctgacagtgatcggccagggactcgtgggcatgacccctagagatctgggaacagtggctggcgccaccgcacagattcagaggcctatccaggtgcagacaggcggcagactgttcctgattcacctgagaaaggtggacacccaccatctgcaggtcgtgaccaagaccgtgacagccacaacagctgacggccagaggatgcggagactgaagtgcaaggcctgtcggctgagatgggccagacctgaacctgctgcacaggctcctccaaagagccactttccacctcatcctagcggcccctccagaacctctagcctgcagctcagacccattcctccacacctgagacacccactgctgctgaagggaaagaacagcccctgctgccaaaagaaactgcgggtgcagaaccagggccatctgctgatgatcctgctgcataacgccagacagcccagcaggcctaccggaagaacccctaccacaagactgatggcccctgtgggcagcgtgatgtcttgtagcctgctgacccagccatctcctgccagcgcatgtacaatgccaccactcctgcatccacagtgggccccacatagtgctggactgtctccaggcgcttgcagacctgcctgtacctgcatcagcatgaccaccatctccagagccacatggcggctgagaatcccaagcctgaggaagtaccggcagaacatcgagatcacccctcagcggtctaaggcccaggtttccgtgtacagcggcaatctgctgagcttctccagacggggcatgaagagtagcgtgcggctgaagaacagcatccctcacgtgccaaaagccaccgccgctcactctgtgacagtgaagctgcagtacctgtttttcctgaccgtgtgcggcttcgaccgggtgttcctggttaagatctgcaagaagaagctgctcctcaagctgctgagaggccccagacggaaagtgctgatggtgctttggctgcccgccaaccagagtctgcagaaaagccaggtgttccagtgggtgctgcggaccgaaacctacatggaaatgcactacggccatcaggcccctcaggtggccatgctgcctaaactgctgtgtagacagatgctccccactctgtccacactccagcagaggcatcctcagggaccttgtcctcctcctgtgacacctctgagagtgcagtctgtgctgctcctgggagtgcctcagacagccgcttttagcggccggattctgcaccagccagaaatggccgccatgagactgatgcccaagttcctgaactccaccaacagctggtggacagtggcccctagatgtcctagaagcgccgtggacattagccccggacctacatctcctagcctggcctcttgtgcctctgtggccattggaaaactggcactgctgggcgcatctgccccttgtggcgcagctggtgctagagaggctggaagatttgccgtgctgggcaccatggttatgaagggtgctgccgcagcctcctgtcagtctcctccatctccaagagagacaacccctagcagcgacgccaccagacggacaagacctattgccgctcagagcaaaaagaccatgactgccgccggactgacccctcggagaaacctgcagagaaatctgaaggtcctgggcgccaagaagatcaccttcctgagaaacagcagacgcgccacacctacctctaagggcagcctgagaagaaagtacctgagagtgaacatccgcaagctcatctggaccaagcagcggagcttcctgtctctgttccccaagctgagagccaccgagcagatgaccaatgtgggatgcctgctcaagaaaagcagccaattgcggcggagctggcgcaatgtgtcccggatcagcaacatggaacacaggctgaccatggacagcgccctgagcctgacaaagagagagggccctgagacaagcgagaagaagaggaagttgcctggctacccctacgatgtccctgactatgcgtcc

SEQ ID NO: 1194 - DNA, 4641 bp, Artificial Sequence
  Polynucleotide encoding the hTPA- and HA-extended poly-FSP polypeptide 4D
atggatgcaatgaagagagggctctgctgtgtgctgctgctgtgtggagcagtcttcgtttcgcccagccaggaaatccatgcccgaaacagaaagaccagaaaggccgccagagagaagcaccgcaagaccgacgacaagaagaagaagtccaccgaaaagaccaagaacgccaagaagatgcccttccagcagcggcctcctctgcagcctgttaacctggatctgcagcaccagcgcagacgcaaaaagaagaaagacaaggtcgaaatccggaatcggagccctaaggccaatagcaccgagtgtcagggcgagcacagcagagagcagaacctgctgaatctggtgcagctgaaccctcacagccctcaccacagaaaggacgaagaggaccaccagaagcggcaccaccaccacaatcaaaagaaaatgagcgtgcgggctagcgtgtccttctggacacttttgccaacaaccggcgtgcggacaagaggctctccactgagactgacactgtggcctccacgggttccaccttctccacctcttgctctgggccccagaatgcagctgtgtacccagctcgcccggttcttccctatcacacctcctgtgtggcacatcctgggacctcagagacacacacctcaggctcctctgaggctgtggtcttggtgcggcacaagccagacctacttcggcagcagaccatctccttgcctgagctggtccagcagaattgtggcccctggacacgccctgagctgtcggactagaagaagatggtctagcaagcggtggatcttctccaaccagctgaccgtgcagatgctgtgcctgccaatcacacacccattcgcctctcagcctctgggacaagagatgcccaacaacacccagatccggctgctgaagccctgcagagtgaacgccgtggaagaactgcacagcaggcggatgtctgtgcggatcgtgaagaactgggtgtcctgctgttacgtgcggctgtctgctgtgggcctgtctacttggagtgccctggacgaggaaaagaagaacggccggatcagcagcctgaaaaagaaagtgaatgcctgcagctccctgatcctgagcttccagcgcgtgaaaaccggcatggaaatcctgctgtggattctgctgaagatggaaattcagatcttcaagatttgcctgggcgagatgcagctctgcggccaggcctttggaagctttagcgccgatttcagcgcccctcagatcattaagaagatgaagaaacggatcatggtgcacgagctgaagaagaatctgctgctgcctatgtgctccagcctggctctgccaacaggcctgacatctctgatcctgcctagcagcgatctggccgtgctgatctctagctccaccagccactttctgatgcggagccctgtgctgccaagcagcagactgacttgtgcctctccacagctgccccggatgtggacttggtctagctggctgaagaacgagggcaacaaccactggcctagagtggaaatgcctaccggctggctgctcgtcggctacaacaccagaaacacagcccagaatcctcggctgcagcagcacctgaaacactggcagcagtgcaccagagccagatggtgtcaagagccctgtcagaccctgaccttcttccatttcttcttctttttcaaaacggtgtccctgtgttgccccggctggtctaaaggacaacctcctccacctggcctgaagccttctagcctggcttctcaggtggccagaaccacaggcgtgtaccagcacgtgtggctgatctgtttcgtgtttttcgtgtgtgtggaaaccggcttctgtcacgtggcccaagtgggactcgagagactggtgtctctgtccggcatcaccgacgtgaaccattgggcccagcctaagccatctcctagcaaaggcaccggcatgaacagacccatcggcctgagagttggcaaaggcgtgtgggccagactgatcctggccatgacactgaccctgaacggcatggccaagaagtcccagcagcctctgcaggtcgtgctgagactgggaaacctgcctccattcttcagaggcagcgaggtgccctttcctagaccttgtcggaccaagcctgcctgcacaagcaaggcctggactcccagaaaactcgtggggagagccgtgcggagaaagggatctccactctgggattgctccaccacaacaggcacacaccacggatgcctgtgggagatcccatctgtgaccctgctggcccatcctagaaccgcctctatcaccctgcctaccacaagcctgaagggctccagaaccagctgctgccctagatctcaccccagactgcctaggaccaaatggcccctgcagtgtctgctgcacagcctgggaacaaccggaacactcgtttgggaaaggggcgtcctgcagatgagatccctcgaagcccattgtccactgcagaccttccatctgcaccactgcaggacccagcctagctcttgtcctcctgcctggattctgtaccaaggacagtggagcggagccgtcgtgggacttagacctgtggctcaccatctgcctagacctatccagggcctgcactgtccacaggcacctcatcaacctgctctgagctggggaaaatggcccgtgggaatgacaggccctgccagatgttgcagatggcccagacggtgccagaagaaggttccatcagcctctccatggggcctcgtgctcaaaaagaaccggaaacagatgctgaaccagaagtgtctggccccttttagagagagcaccctgggcaatttctggatgaagctgctccagctgcctgtcgtgatcaacctgaagagactgcagaagttcaacctgcacctgtgctactaccacagccagagcaacagaaacaagagccgccagatggaatccctgggcatgaagttgcagtcccagaaatcccagcaccactgtgccctgcggaagatcgagtgggccacaaagttgtctctcggcggaaaagccggaccacaggctcaagagaaggccacctctcggattctgaacctgcaagtgctcaagaagatcctgcggagctttatgaagctgtaccactctctggtcatgtgcctgcggctgaggaccaagctggaaaaggctctgagcgccctgttcatctggccccagcacagctacaagcccctgttctttcacggcgacctgtgcgagtggggaggccaggctcatagacagcggaactggctgaaaaactggaagcggttcaagcttaaaaagaagtacatccagaagaagaagcagaagtctaacaagatcatctgcaagggccaccgcatcaccatcatctgtatcaagaatatgttcctgcagcgcaagggcttcctgaacctgagccacgtggaaaagttctgtagaggcggccctagcgccagcgatagatgctgttcttgtagccccagcggcttcagtgccggcagaggaagatgtcctgttcagggctgtctgaggccccacagagttcaactgctgagaagatggggccctggctctcctgctggacagaggctgtctaagggctttcagctgctccgttggtggggaccaggatctcctgctcctgagcctagaaagggcccatttccaccacctgatcctccatggcctgtgaccgctgtgacagtgatggctggatctgtgcctagtgctcagtctgtggacgccctggaatctcctggacctctggctctcgaaggacctagcagccctagaaacctgctttggagagagatgagcatctttctgcccggcatcttcaccgccaagaaaagccccaccagcttttgctgcaatatcctgaacagcctgccaagctctatggaaatcgccgtgctgcaagaggacagcaaaaagatgacccagaagggccaagccttcggctccctgtgtcagcttgtgtccgctgacttctctgcccctcaagtgacccggctgcggagcctgaatcatctgctgatcacctacacaccccacatctgcagacacaccctgctgacccctgacaccagatggatctttagcaatcagctgcagacagtccagatgctctgtctgcctccactgaagcagggcgagagaatcatttggcccctcggcggctttcagatccccaacttcttttggagcctcggcatcggacacactggcgcctggtggcatactggaaggcggagaagagaatggggcggcagcaccgtgtctagaagccctctgtggatcagctccatgatctacctgagaggcatggccttcgccagcgacagcagcatcagaaccaccagagtgtcctggtgcagaagatgcggcgccaaaagcgctgccgccagctctattgaagctctgaccgctctgtttacctgccggaccgccagcatcagcgtgaacatcagcaccctgatgtccatcctggaagcacttaagaagaaacccagagacatctgccgcatcagctgccggtgtagacgcgagtacagagtgactatgggctacccctacgatgtccctgactatgcgtcc

SEQ ID NO: 1195 - DNA, 5250 bp, Artificial Sequence
  Polynucleotide encoding the hINV- and HA-extended poly-FSP polypeptide 1C
atgcatcgacggcgctcacggagttgccgggaagaccaaaagcctgtgatggacgatcagcgggaccttatttctaacaatgaacaacttccgatgcttggtaggcggcctggagcaccagagtccaagtgttctaggggcgccctgtacactggtttctccatcctcgtgacactgttgctggcgggacaggcaacaactgcgtatttcttgtatcagcagcaaggaagactggataagcttacagttacatcccagaatctccaacttgaaaacctcagaatgaagcttccgaagcccccaaagcccgtctccaaaatgaggatggcgacaccgctccttatgcaagcccttcccatgggggctctgccccaagggccaatgcagaacgctacaaagtatggaaatatgacagaggatcatgtcatgcatttgcttcaaaacgctgatccccttaaagtttaccctcctctgaaggggagctttccagaaaatcttcgacatctcaagaacacgatggaaacgattgactggaaggtgtttgagagctggatgcaccattggctcctgttcgagatgtcccggcattctctggagcaaaagccgacggacgcacctcccaaggaaagcctggaattggaggacccgagtagtgggctgggcgtcacaaagcaagacctgggacccgtgccgatgagcaccagacgggaaatgccttctcaggccacaccttctccacctggaccttggagagccgctctgggcaaagaagtgaagcggagccagagcaagctgcggctgagaaacacaagccccaccgagatccaattgaccatgaacgacagcaagcacaagctggaaagccccgctctgaaacaggtgtcccctgcctctccacctacacagcagcctcagacaccccaggatagcagacaggtgctggccgcttcttctcctggacatcctcttggccctggcgactgccctagaacaatggctggaccttctgcctctctgcacccagcatctggcagagccagcagaaagacctggcagagaaggctgagagcctgtagagctggtggacctgctggatgggctagacaggccatgacactgaaggccctggtcaagacctggacacagttcagaaactaccccagagtcggagccggaacaggcggaggacctgcttgtgttcctgtggccgaagcttctactggcgcctggacagctgaaggcgctgccggaacaagatgcagagcttctagagccccttgcagacagctgcctgccagctctcctaccaagtgcgagatctgcgtgaagagaaggcggcggagaaagcggagcagccagtctagatctcccgtgcctaagaaacgcgagcggatgatgctgcctgtgcgggccagaacagctagatctgctctgccacaaggcagagcccctctggaaggaatgcttctgcctagagcactgcccagcctgctgagcagaatgccagccagaagagagagccggttttggctggcactgcaggctctgggactcagacctcctcatctgcctagctgtcaccctctgcctcaactgcttggacctcctccacctcatcaggcccctttcgacaagaaaggcttcgtgatcctgagcaagggcaagaagcgccggaaagaaatccggcggatgaccagacggaccatgaccaccaccaaaatgatgatgatgcggcggaccaagcggcggaggcgaaaacgtagaagaatgaccatgatgacccgcagaaccctgctgaccaagaaaacctgtctgacccctagaaccagcgccgccacaaaagctctgcccagacagacaatcagccagcggaggcctatccagacacctcctggaacaagcctggccatctggggcagactgcctctcagaccacagagaggacctcggcctctgcatagatggctgcagcagacaacaggctgctcccagagaagaatcgccaagaagcggatcaagctgaggcggaacacactggccatccggtttatctctgcccctcagcctagcagcagcaccgttacagctgctcctagcggccagtacttcagcagcttcttctacaccagcgaccggaccaagtgtgaaatctgtgtcaagaacaccgccatcctggctatcaccctgatcacccctcaggaccctcacctggaccctgtgtgtcacccacatagaaggcctggctggaagggccaccacagagtggtgtttagccaccatccaagcggctccaccaagagccattggcagcagagagaaagaggcggaggccgcagagaaaaaaagggctgcagagagatgcccagcagctggtctagctctggcagaaccgccgacaaaaagaacgtgcggagcagaaccagactgaccctgacaggcacaagaagcagcggcacaagagcctctccaagcgccgtgtgtctgtgctgttggacatgcccctccagaagcttccctgccgcatctccatctggactgagagcacctgttggagcccaggctcctcctgaagtgacactgagagccagctgtgcctctagcgcctctaaagcctgtgctggactttggccttggggagcccaagtgcggaacaaagtgcggcagaacttcaagcggaacctggccaaaaagaccctgactaacgccctgcggagtatgcccaagagcagaaaccaggtgctgttcagacggaatctgaccccaagccagctgagaactctggcccctccttacatgctgctgccccagtctctgtctcagagcctgtccagaaagcagatccccagccaatcaatgctcgtgaccgccttcttcctgctcgacatcatcctgagaagcctgctgtactcccggatgtgcctggtgcagatccctacacacacctgggagcccgactacttcgtgtccctgcctatgatgttcagctgggccactcagagctttccagtgggagccgtgttcctgaccagacctgccattccttgctgcagctgtaccagccacagcaacccttggagccagtccttcaagaagaagaagcccctgacattcagccccagcgtgccaatgtctctggcctgtagcatcaccgtgtccttcgtgggccagatcagcacactggtgctggacgtgtcctccatctctcactggcgcaagcgcaagagagagaagcggtcccagaagtcccggcagaaccatctgcagctgaagtcctgcagacggaagatcagcaactggtccaagctgagatccccgtggatcttctaccctcggctgaaaaccttcggcgtgccactgggctctatcctgtgtctggcaggctccctgagcacgatgatgatcattagcaccaccagacaagagtgtggcagacgggcctccgtgccttgtagacctatgatcggcagcgctagacccggaccttggcggacatctgctatgccatctgccatgggagtcgccctgcctaccagctgtgaaagcggaagatctcctcctgccaccggcggaagaatgcctggatctcagtctatcatgatgagctggatgcctccactggctccctgtgccgcttgtccttgttctcctgctcctacactgtgccctgctcatcctgcaagagcccctacagccgtgcctgcctttacacctctgtctgctcaccctgtgccagtgctgtctggatgtcacctggccgtgcgcacctctatgctgacactgctgcccatgagacaccctcacagaagcccacctacaagctgccctccactgctggaagctttcccactgccaagggccagcctgagagctaccgtgcctagacacagctctgtgctggccactggactgcatctgcatcggcagattagcctgcctctgaggggcttcctgctgcatcaacctctgcctggacaacacctgtggctgtcccacagactgaggctgagactgccaagaacaggcgagaagaacgacctccagctgttcgtgatgagcgacaccacatacaagatctactggacagtgatcctgctgaacccctgcggcaacctgcacctgaaaaccacatctctgcggagagccagacctacctcctgcagcacatgcagaatgtggtggctgaagctggccccactgcaagtgaccacaacactgaagctgatcctggtcatgctggaaatcgtgaccgaagaggccaagaaatccatgaagagatcccggcggagcaagatcgaggcctctcctatcggctccatcatgaagaagaaagacagcaccatcttcatcaaccagcagctcaagtggacccctcacatcctgaagtctgccagcgtgtccaagaagagactgcccaagctgaacggcatctgggaagtgatgccccggacactggaaggctgcatcagcgtgaaggaccaccggacaagccagaaccacagcaagtgcatcaccgagtgtgtgcggacagccctgaaccagagaaaggtggtcaagaaccccagccagccagtgccactgagaaacgacggcatcaccaacggcaacgactccaccagatcctgctccatcagcctgaagaaaagcctggaaaagatgcccctgatgaacgccaagaaaatggaagatatgatctgggagagcaacatgggcggcaaccggtccatctgcctgacaagactgccctgcaaagtgaccgagtccagccaaagaccacctcggagcattctgtccctggcctctagagccggacagtttcccgtttggcggagaaccagcagaggcatgtccctgcagtggaagtccggcaatgcctgcacacctctgaggtgccctagcagaagccctgccacatttctgaccgcactgaacggctggcacagatctggacttagggctcagcaacctagcctgccaggaccttgtgctagcctgctgtctacactgagccagcctccaccacaggctccaagccaagtttggacagccgccacactgagatgtcccgctgttcctgcagctgcttgccctcctatcgtgttctttctggccccatacttccccacaccactgagcatcagcagacccacctctcgggccagacagtcttgttgtctccccggactgacacaccctgctcaccagcctcttggctctatgggctacccctacgatgtccctgactatgcgtcc

SEQ ID NO: 1196 - DNA, 5232 bp, Artificial Sequence
  Polynucleotide encoding the hINV - and HA-extended poly-FSP polypeptide 2C
atgcatcgacggcgctcacggagttgccgggaagaccaaaagcctgtgatggacgatcagcgggaccttatttctaacaatgaacaacttccgatgcttggtaggcggcctggagcaccagagtccaagtgttctaggggcgccctgtacactggtttctccatcctcgtgacactgttgctggcgggacaggcaacaactgcgtatttcttgtatcagcagcaaggaagactggataagcttacagttacatcccagaatctccaacttgaaaacctcagaatgaagcttccgaagcccccaaagcccgtctccaaaatgaggatggcgacaccgctccttatgcaagcccttcccatgggggctctgccccaagggccaatgcagaacgctacaaagtatggaaatatgacagaggatcatgtcatgcatttgcttcaaaacgctgatccccttaaagtttaccctcctctgaaggggagctttccagaaaatcttcgacatctcaagaacacgatggaaacgattgactggaaggtgtttgagagctggatgcaccattggctcctgttcgagatgtcccggcattctctggagcaaaagccgacggacgcacctcccaaggaaagcctggaattggaggacccgagtagtgggctgggcgtcacaaagcaagacctgggacccgtgccgatgcggcagatcaacagacggaagctgcagagaaagaagcgccggaagaagagagaggaccactgcggactgcgggccagaaaccggaacatgaagaaaaccatgagccacctgatcgcccatcaggccctgaagatgtctggcctgagactgtttcaccccagactgctgacacggaagaagcctggcaagaaccctcggagaaagacctggaagatgcggaagaagtacgcccagaagcctagccagaagaaccacctgtacggcaagggcctgacacaccctgtgcctctgaagagaaccctgcagaacaagcggaacaagaacatcaagcgcgtgaaccagaagaagggcaacatcaagagaaagagcatcctgctgcacctcatcgtgctgaacagccccgagagcaacctgcaggctcatcctcaagttccagcactggctcctcaggcttggtggcctgctagaagaggccctctgacaagcgctccatctgctcagcagagcctgaccttcctgcctagcagatttccttggggccctcctccactgcactggaactctgcctacctgggcagaacactgctcgtgacctgcatcctgtaccacagatggatcgtgaccagcatgtgccagagccagagatggctgaccagcaccacctctagaagcagcgccctgatgtggacccagtggtctagcgtgacaagcctggaatggacagcccaagagaggggctgtagcagctggctgatgaagcagacctggatgaagtcttggagcctgcgggaccccagctacagatccatcctggaatacgtgtccaccagagtgctgtggatgcccacatctacagtgggagccctgagagccacagctcctgcaacagctgctccacaggctcagacccctcattggagagccgccacaacaagcagcatgagcagcagccctagagccgagcctacaagctctagctcttgggccacctgttggcccagatgttgcagctccagctgttactggtccctgtcctcttggcctcctgctggtgctgccgaggccacaaataccaggaccagaagcagagagtcccagcggggcagaatgctgacttggagaagcagcctgtggctgcagggcaccagatgttttacaggcgtgcggacctccagcagacacccttcttggccttggaccagatgcctgagaatgcggcctcctagaagcaacagccggaaaaagctgctcgaggacatgaagcaaaatggcttcacccggtacaagaaacggggcgtgatagcctggcggagagccactttcctgctggccctttgggagtgcagtctgccccaagctagactgtgcctgatcgtgtctaggaccctgctgctggtccagagcagatgcagcctgatggaacagatccctcacctgaagtcctggtggtgtacaagaggcggcggaaagcggaagaaaaagatgtgcaaggtgtccggcggctgcaccgcctgtgttgaaagatgtccttggaagggcatctgctggaagtggcctgtgacagtggccgctctgatcctgattcagcacggcggcatcttcaccttccggttctgggtcgagaagctgtcctggaacatctgcaagaatctgtccctgtacctggacaagttcgtgcagcggctgctgtacgtgtacatcatcgagacaaacgtgttcgtcctgaacctgttccacgtgccagtgaatcagatcttcatgatggccttctacctgaagtacaccgagaaggcctgggtcatggaactggaatggctcattcagcagcagtgctaccagttgctgctggctcatatgtacggcttcagcacctacggcacccagaaaggcgagtgcgtgtgtctgcagtgtctgagcggcagctccctgttcatcctgaagcagccactggacctgaagatcagcaagaccttcatgagcagatcccacctggatttcagcccctattggatgaagaaagtgaaggcctctccacagatcatgcagcggatgagcgccgtgaacttcgagacaatcaggcggaagtggcagatccggcacgtgctgaagaacctgcctctggaaaacacacagatccccaggacaagccctctgtggaagatcacaatggtgctgacataccccaactgcgtggtgcatgtgctgatgttcgtgctgttcaaggccgaccagagcgagtctagcctgagcagcggaatctaccctcctagcacctgtagcctgccttgccggggcattagaatgtgcgccctgtctcaccctagcttctacatcagcagcaccgtgtgctttctgagcaagcactgcatgaccgcctgcaccagagagaagatcatcaaccccaccatcagctgcccctttcagagccccacaaagagactgggccacagagagggcagcgagagcgataatctgggcctgctgtactcctttcctccttggctgcccatgagatccctgggcgaaccttggagagctggctttcagtggggagagtccccttggcaagtgatggctagcctgaccggcaacagcgtgatcgtgcacaagatcgtgctggtgtttctgaagtctctgagcagctacaactgcgagcggcggatctctggcatccagaagagagccatcgagttcgccgtcctgaagctgctgaacatggacctggctagccctcagattatgcagagaaccagcgccgaccggttccggatgaagcggagaatgcagaacctggataacctgggcgtgccctggccattgcttccaggtgctgctcctccacatagactgctgggcccctctagatggattctgtttcatgtgcggaacatcgtgtacggcatccaagtgatgctgtgccggcggagaaacagcagaaagcagagtcaggtgcagctggccattcaggtcctgctcgtggacaagcacaagtactttctgttcggcccctatcctatcagcgagggactgaccatgaccaccggccggaacatcaacagcaactccctgatgaccaactgcctgttcagccccatcttcctgtgccaccacgccatcatgcaccggaagatgacaagcccacacttcagactgttctccagcaagatcccacatcctcaggtgccaagtgtggtggccctgtgcaagttcctggccaatggcctgtggttcaacctgatctttcagaaaaagggccacatgatctttagccccaagttcttcctgacctttagccagcggaccctggaatccgccggactgtttccatggctgcacacccagtgccggaacaaaaagaccaagctgtggttttccctgatcaacatccaccaccgcaagaatcctctgctgcctatgagaatgagcagaacacctcctcggagagtgtgcggatctccacctctgcatctgtgccaacctctgagaggcggcaagaagagaagcaagttcgccttctggaagcctcctagccagggcatcagctcttgtctgatgacaggctgttggggctcctgtggcagagcttgttcttgcggaagaggctgcggtacacccagaggcgactggaaaagacacccacctcgcagagagctgagcctggaaccatggattccttatctgcaccagcaaaagacccagcggaagcggatgaagaccggcgccattcaagagaagggcgctatccaagaaaaaggcgcaatgaccaagcggatctgcgtggtcaatttcgaggcctgcagagagatggaaagcctgagcgcccctgagaagattaccctgttcgaagcccacatggcccggtgcacctccatcaatgtgctgtgtgtccgggccagcctgattgagaagctgatgaaagaaaagcgcaagatgaagcgcaaccaggtggcatcccctcaaatcatgcaacggctgttcatcaagggctaccagaacaaccacttcacgttccacctccaaaactttgccttcttcagctccttcggcaacaacaagtatatcaacattctcacccgggccttcatccacacacctagaagccctggctgttccgtgtacgccaatatgtgctggcggaagatgcagtccctgaatcaccccagcagactgaccaactgtcaccccgcttggctgagccccattagtgcttgtcctaggctgctgccctatccttttcacgtgctggcactggaagtgacctttccacctggcacagccatgcctcagatgcaattgcaggcactggctatgtgggagaaaggctgggacaagcaagagaagaaatcccgcaagctgatgtcctcctgcctggaaaaaaaggctacctggatgcggagaacccctggcacaagcctgcagtgttacctgaacacacacccctgcaccatgctgctgcctcagggaatcccatctctgaacgcccagtggatgttcctgcggatcggctacccctacgatgtccctgactatgcgtcc

SEQ ID NO: 1197 - DNA, 5247 bp, Artificial Sequence
  Polynucleotide encoding the hINV - and HA-extended poly-FSP polypeptide 3C
atgcatcgacggcgctcacggagttgccgggaagaccaaaagcctgtgatggacgatcagcgggaccttatttctaacaatgaacaacttccgatgcttggtaggcggcctggagcaccagagtccaagtgttctaggggcgccctgtacactggtttctccatcctcgtgacactgttgctggcgggacaggcaacaactgcgtatttcttgtatcagcagcaaggaagactggataagcttacagttacatcccagaatctccaacttgaaaacctcagaatgaagcttccgaagcccccaaagcccgtctccaaaatgaggatggcgacaccgctccttatgcaagcccttcccatgggggctctgccccaagggccaatgcagaacgctacaaagtatggaaatatgacagaggatcatgtcatgcatttgcttcaaaacgctgatccccttaaagtttaccctcctctgaaggggagctttccagaaaatcttcgacatctcaagaacacgatggaaacgattgactggaaggtgtttgagagctggatgcaccattggctcctgttcgagatgtcccggcattctctggagcaaaagccgacggacgcacctcccaaggaaagcctggaattggaggacccgagtagtgggctgggcgtcacaaagcaagacctgggacccgtgccgatgcctattcctccacacctgagacaccctctgctgctgaagaacaagaagcggagaaagctgcggcccaagagcagaaagaagggccacaccaagaaccggcggaaggccaagagaaagccccagatcagaaacagccgcagagccacacctaccagcaagggcagcctgagaagaaagtacctgagagtgggagccgccgctgctagctgtcaatctcctccatctcctagagagacaacccctagcagcgacgccaccagaagaaccagacctatcgccgctcagagcaagaaaaccatgacagccgccggactgacccctagccagaagaaagatcctgccggcaagctgaagaaacaggtgtccgtgtacagcggcaacctgctgagcttctctcggagaggcatgaagtctagcgtgcgcctgaagaactgcaccaacctgagcgtgcccatgatgctgaccatcctgatctggaagcgggtgttcatcctgctgctgtccgacaagaaatctatccctcacgtgcccaaggccaccgccgctcattctgtgacagtgaagctgcagagccggcggaacagacggtacagaaagatctatggcgagctgaagatgtccctgcaggccagcaatggcatggaagcctgtggcacacaccccacacctagactgtccgtgtccgtgatcaccatgaagctgtgggagaagcacttcaagggcctgaactggaacctggtcgtgtggattctgaacctgaagatgatgctcaagaagaagtatctggtccagcgcgagtgggagaaacggaagcagattcttggcggcggaggcaagtacaaagagtacttcctgaagagaatcctcatccgcaaggccatgacagtgctggccggcgataagaaaggcctgggcagattcatgagatgcgtgcagagcgagacaaaggccgtcagtctgcagctgcctctgggcagaatggacctggatggaatgctgaccgtgatcggccagggactcgtgggcatgacacctagagatctgggaacagtggctggcgccaccgcacagattcagaggcctattcaggtgcagacaggcggcagactgagaggccctagaagaaaggtgctgatggtgctgtggctgcccgccaatcagagcctgcagaaaagccaggtgttccagtgggtgctgagaaccgagctgcccctgacctttagcaccctgctgtgggacagcagacacgacctgcctagaatgctgcccatcagcagccctctgcacagaccccagatgcctttctggacctgcacctttcctgccaccacatggggcacatgggagacaccttctacatggggctggcggacctttgccagacagccttctagacccaccggcagaacccctaccaccagactgatggctccagtgggcagcgtgatgagctgtagcctgctgacacagccatctccagccagcgcctgtacaatgcctccactgctgcatcctcagtgggcccctcattctgctggactttctccaggcgcttgcagacctgcctgtacctgcatcagcatgaccacaatcagcagggccacctggcgcagaaacctgcagagaaacctgaaagtgctgcggctgagaatccccagcctgcggaagtacagacagcagaacacccggtccaccaacctcgagaagaacccatctctgaagaagcagagccagaggcggggcaagctgtctctgaccacactgagcttcgtgctgatcgaggaactgctgaaaaagagcagccagctgcggagaagctggcggaacgtgtccagaatcagcaacatccggaagctgatttggaccaagcagcggagcttcctgtctctgttccccaagctgagagccaccgagcagatgaccaatgtgggctgtagactggattttcaccccagaagcagctccggcgacagagtgttcctggtcaagatccagagcagcccattcctggccagatcctggaataccatgcagtggaacaacaagaaaatggccatgactgtgatcgctggcgcccaccactgtcagtacaagctgacctacaccaaagtgtggaagatgaattggaagaaaatgatgatcggcagccagcacctcctgttctccccactggatagctctccactccagctgctgctgcacccacacggcaagagatgcaacccctgttgtcggctgacatggatgagccacctgaatcggaagctgcacctcaccaggtcctgcctgatcgacctgaccatgatgatgagccagaaactgtggaagaatcagcggaagcgcatccctctgccttctccaagacagcatctgctgcctcagtatcctctgcaccctcctccaccttgtctgctgcttctccaccatagacaccacctggcattcctcgagatggcctgtagctctcagcacacccacagcatcaagatctggatcagcttcagccacgagacaatgagcctgtccaacatcctgatgaagttccggctgaccaccaccacaagcagccccagaagaagccctgctctgcgagctagaggcggcacaacaatcggcgaagtgaccagcagcctgttctttagccactgcctgtgcgtggcccctagatgtcctagatctgccgtggacatcagccccggacctacatctccttctctggcctcttgtgcctctgtggccattggaaagctggcactgcttggcgcctctgctccttgtggtgctgctggcgctagagaggccggaagatttgctgtgctgggcaccatggtcatgaagaacatggaacacagactgaccatggacagcgccctgagcctgacaaagagagagggccctgaaacaggccccgtgtactacgtgtgcaaccggatgaatgtgtccagcgtgctgaagcctttcctgttcaccgtgcctatcgaggacatgagagagtgcaccctgggacgcaacagaatgaatgtctcttccgtgctgaaaccctgtctgatccccgtgccaatctgcaagaagaaactgctgctcaagctgctgaggggcgcctccagctctaccagcagagatagcagaagctttttcaccagcgctcaccccagcagaccctgcaggatgagactgtaccagatgctgcagaagcagtgctgctacaacctcgtgatcaagcaccctctgatcttccggatcaacctgcggagacagggcaagaccaaagacggcgttgtgcagagcctgggcttcctgaaccagcagatcatcctccagaaagagttcttcatctgcctgctgatgttcatcaagcggtggaagccagccgccaccaagaagggcaagaacagcccctgctgccagaaaaaactgcgggtgcagaaccagggccatctgctgatgattctgctgcacaacagaggcccacctctgcataccagattcgagaaaaagcggcccgagtggctgagcagaaaatccggcgtgatgaagtgctgggatctgtgccctgccttcagcggcaggattctgcaccagccagaaatggccgccatgagactgatgcccaagttcctgaactccaccaacagctggtggacagtgcacaagaagagaggcctgttccaccagatgaagtgtctgaccgccgtggactgtctgcaggccttctgggatatgagcgagaagaaacgcaagctgcctatgattcgcaaaatccagaagcggcggagaaccgccaaccggaacatcgagatcacccctcagagaagcaaagcccacctgaagaaaacctccgccaagggcgccaagaaaatcaccttcctgtgcctgagagtcagatgcggaggctggctgtgtggctggacaccaagaggatggctgaagaagtccaccaagtccagactgtgcttcttctacctgctgtactacctgtttttcctgaccgtgtgcggcttcacccctccaccacttattctgtggcctcaggcagcccctggcgagaagctgaagcactgttttaaagcctggggcgtcgaccctcctggcagcgtttggattctgccctgcttcctgattcacctgagaaaggtggacacccaccacctccaggtggtcaccaaaacagtgaccgccacaacagccgacggccagaggatgagaaggctgaagtgcaaggcctgccggctgagatgggctagacctgaacctgcagctcaggcccctcctaagagccactttccacctcatcctagcggcccctccagaaccagctctctgcaattgagaacctacatggaaatgcactacggccatcaggccccacaggtggcaatgctgcctaaactgctgtgtcggcagatgctccccactctgtctaccctgcagcagagacatcctcagggcccatgtcctcctccagtgacacctctgagagtgcagtctgtgctgctgctcggagtgcctcaaacagctggctacccctacgatgtccctgactatgcgtcc

SEQ ID NO: 1198 - DNA, 5250 bp, Artificial Sequence
  Polynucleotide encoding the hINV - and HA-extended poly-FSP polypeptide 4C
atgcatcgacggcgctcacggagttgccgggaagaccaaaagcctgtgatggacgatcagcgggaccttatttctaacaatgaacaacttccgatgcttggtaggcggcctggagcaccagagtccaagtgttctaggggcgccctgtacactggtttctccatcctcgtgacactgttgctggcgggacaggcaacaactgcgtatttcttgtatcagcagcaaggaagactggataagcttacagttacatcccagaatctccaacttgaaaacctcagaatgaagcttccgaagcccccaaagcccgtctccaaaatgaggatggcgacaccgctccttatgcaagcccttcccatgggggctctgccccaagggccaatgcagaacgctacaaagtatggaaatatgacagaggatcatgtcatgcatttgcttcaaaacgctgatccccttaaagtttaccctcctctgaaggggagctttccagaaaatcttcgacatctcaagaacacgatggaaacgattgactggaaggtgtttgagagctggatgcaccattggctcctgttcgagatgtcccggcattctctggagcaaaagccgacggacgcacctcccaaggaaagcctggaattggaggacccgagtagtgggctgggcgtcacaaagcaagacctgggacccgtgccgatggacagcaagaagatgacccagaagaaccgcaagacccggaaggccgccagagagaagcacagaaagaccgacaacctggacctgcagcaccagcgcagacgcaaaaagaagaaggacaaggtcgagatccggaatcggagccctaaggccaatagcaccgagtgtcagggcgagcacagcagagagcagaacctgctgaacctggtgcaattgaaccctcacagccctcaccaccggaaggacgaggaagatcaccagaagagacaccaccaccacaatcaaaagaagatgtccgtcaacgagggcaacaaccactggcctagagtggaaatgcctaccggctggctgctcgtgggctacaacaccagaaacacagcccagaatcctcggctgcagcagcacctgaaacactggcagcagtgcaccagagccagatggtgtcaagagccctgtcagaccctgaccttcttccacttcttcttctttttcaaaacggtgtccctgtgctgccccggctggtctaaaggacaacctcctccacctggcctgaagccttctagcctggcttctcaggtggccagaaccacaggcgtgtaccagcacgtgtggctgatctgcttcgtgtttttcgtgtgcgtggaaaccggcttctgtcacgtggcccaagtgggactcgagagactcgttagcctgagcggcatcaccgacgtgaaccattgggcccagcctaagccatctcctagcaaaggcaccggcatgaacagacccatcggcctgagagttggcaaaggcgtgtgggctagactgtggctgaagaactggaagcggttcaagctcaaaaagaaatacacaggcatggaaatcctgctgtggattctgctgaagatggaaattcagatcttcaagatttgcctgggcgagatgcagctgtgcctcaagaagaaagtcaacgcctgcagcaacgccaagaaaatgcccttccagtgccggtgcagacgcgagtacagagtgaccatgattcagaagaagaaacagaagtccccgctgttcttccacggcgacctgtgcagaccttctccttgcctgtcttggagcagcaggatcgtggctcctggacacgccctgagctgtcggactcgtagaagatggtccagcaagatggccaagaagtcccagcagcctctgtgtagaggcggcccttctgccagcgatagatgctgtagctgtagccccagcggctttagcgctggaagaggcagatgtcctgtgcagggatgtctgaggccacacagagttcagctgctgagaagatggggccctggatctcctgctggccagagactgtctaagggcttccaactgctgcgttggtggggaccaggatctccagctcctgagcctagaaagggcccatttccaccacctgatcctccatggcctgtgaccgctgtgacagtgatggctggctctgtgcctagcgctcagtctgtggatgctctggaatcccctggacctctggctctcgaaggccctagcagccctagaaacctgctctggcgggaaatgagcatcttcctgcctggcatcttcaacctgcacctgtgctactaccacagccagagcaaccggaacaagagccggcagatggaatccctgggcatgaagctgcagatcacacacccattcgccagccagccactgggccaagagatgcccaacaacacccagatcagactgctgaagcccggccaggcctttggcagcttttccgccgatttttcagcccctcagcaggcccctctgagactgtggtcttggtgcggcacaagccagacctacttcggctctatcgaagccctgacagccctgttcacctgtagaaccgccagcatcagcgtgaacatcagcaccctgatgagcatcctggaagccatcctggccatgacactgaccctgaatggcagccctctgtgggactgcagcacaacaacaggcacacaccacggctgcctgtgggagatcccttctgttaccctgctggctaccgccaaaaagagccctaccagcttctgctgtcagcggcctcctctgcagccagtggaagagaagaagaacggccggatcagcagcgtgccaccttctccacctcttgctctgggccctagaatgcagctctgcacccagctggcccggttcttccctattacacctcctgtgtggcacatcctgggacctcagagacacacccctctgctgacccctgacaccagatggatcttctccaaccagctgcagaccgtgcagatgctgtgtctgcctccactgaagcagggcgagagaatcatctggcctctcggcggctttcagatccccaacttcttttggagcctcggcatcggacacactggcgcctggtggcatactggaaggcggagaagagaatggggcggcagcaccgtgtctagaagcccactgtggatcagctccatgatctacctgagaggcatggccttcgcctccgacagcagcatcagaaccaccagagtgtcctggtgtcggagatgtggcgccaaaagcgccgcagccagcagcgacaagaagaagaaaagcaccgaaaagaccaagaacaagatcatctgcaagggccacagaatcacccaggtggtgctgagactgggcaacctgcctccattcttcagaggcagcgaggtgccctttcctagaccttgccggaccaagtgccagaagaaggttccaagcgcctctccttggggactgcacccaagaacagcctccatcacactgcctaccaccagcctgaagggcagcagaacaagctgctgccccagatctcaccccagactgcccagaacaaagtggcctctgcagtgcctgctgcacagcctgggaacaactggaacactcgtgtgggaaaggggcgtgctgcagatgagaagtctggaagctcactgccctctgcagacattccacctccaccactgcagaacccagcctagctcttgtcctccagcctggattctgtaccaaggacagtggagcggagccgtcgtgggacttagacctgtggctcaccatctgccaagacctatccaggggctgcactgtcctcaggctcctcatcaaccagctctgtcctggggaaagtggcccgtgggaatgacaggacccgccagatgttgccggtggcctagaagaatgtgtagctctctggccctgccaaccggcctgacatctctgatcctgcctagcagtgatctggccgtgctgatctctagctccaccagccactttctgatgcggagcccagtgctgccaagcagcagactgacatgtgcctctccacagctgcctcggatgtggacatggtctagctggctgaaagagtggggaggacaggcccacagacagcggaactgtagagtgaacgccgttgaggaactgcacagcaggcggatgtctgtgcggatcgtgaagaattgggtgtcctgctgttacgtgcggctgagtgcagtgggactgtctacttggagcgccctggattccctgatcctgtccttccagagagtgaaaaccagccggatactgaacctccaggtgctgaagaagatcctgcggagctttatgaagctgtaccactctctcgtgatgtgcctgcggctgcggaccaagctggaaaaagctctgagcgctctgtttatctggccccagcacagctacaaaggccaggcattcggaagcctgtgccagctggtgtctgccgatttcagcgcccctcaagtgaccagactgcggagcctgaaccatctgctgattcggtggatctttagcaatcagctgacagtccaaatgctctgcctgccgatcatcaagaaaatgaagaaacggatcatggtgcacgtcttgaagaagaatcggaagcagattatctgtatcaagaatatgttcctgcagcggaagggattcctgaacctgagccacgtggaaaagttcagagagagcaccctgggcaatttctggatgaagctcctgcagctgccaccagcttgcacctctaaggcctggacacccagaaagcttgtggggagagccgtgcggagaaagggcgtcgtgatcaacctgaagagactgcagaaattccgggctagcgtgtccttctggactctgctgcctacaacaggcgtgcggacaagaggctctccactgagactgactctgtggcctccaagaagccagaaaagccagcaccactgcgccctgagaaagatcgagtgggccacaaagctgtccctcggcggcaaagcaggaccacaggctcaagagaaggccaacatcctgaacagcctgccttcctctatggaaatcgccgtgctgcaagaaatgctgaaccagaagtgtctggcccctttcgagcttaagaagaacctcctgctgccaacctacacaccccacatctgtcggcacacccttaaaaagaagcccagagacatctgcagaatcagcggctacccctacgatgtccctgactatgcgtcc

SEQ ID NO: 1199 - DNA, 5250 bp, Artificial Sequence
  Polynucleotide encoding the hINV- and HA-extended poly-FSP polypeptide 1D
atgcatcgacggcgctcacggagttgccgggaagaccaaaagcctgtgatggacgatcagcgggaccttatttctaacaatgaacaacttccgatgcttggtaggcggcctggagcaccagagtccaagtgttctaggggcgccctgtacactggtttctccatcctcgtgacactgttgctggcgggacaggcaacaactgcgtatttcttgtatcagcagcaaggaagactggataagcttacagttacatcccagaatctccaacttgaaaacctcagaatgaagcttccgaagcccccaaagcccgtctccaaaatgaggatggcgacaccgctccttatgcaagcccttcccatgggggctctgccccaagggccaatgcagaacgctacaaagtatggaaatatgacagaggatcatgtcatgcatttgcttcaaaacgctgatccccttaaagtttaccctcctctgaaggggagctttccagaaaatcttcgacatctcaagaacacgatggaaacgattgactggaaggtgtttgagagctggatgcaccattggctcctgttcgagatgtcccggcattctctggagcaaaagccgacggacgcacctcccaaggaaagcctggaattggaggacccgagtagtgggctgggcgtcacaaagcaagacctgggacccgtgccgatggccgacaagaaaaacgtgcggagcgctagttctcctggacatcctcttggccccagaagaatgaccagacggaccatgaccaccaccaaaatgatgatgatgcggcggaccaagcggcggagaagaaaaagacgccggatgaccatgatgaccagaagaaccctgctgaccaagaaaacctgtctgacccctagaaccagcgccgccacaaaagctctgcccagacagacaatcagccagcggaggcctatccagacacctcctggaacaagcctggccatctggggcagaagaagcaagatcgaggcctctcctatcggcagcatcacccctctgagcatcagcagacctaccagcagagccagacagagctgttgcctgcctggactgacacaccctgctcatcagcctctgggctctatggttggagctggaacaggcggaggacctgcttgtgtgcctgtggccgaagcttctacaggcgcttggacagctgaaggcgctgccggcacaagatgtagagccagcagagccccttgcagacagctgcctgcttctagccctaccaagtgcgagatctgcgtgaagagaagaaggcggcgcaagcggagcagccagtctagatctcccgtgcctaagaaacgcgagcggatgatgctccctgtgcgggccagaacagctagatctgctctgccacaaggcagggctcctctggaaggaatgcttctgcctagagcactgcccagcctgctgagcagaatgcctgccagaagagagagcagattctggctggccctgcaggcccttggactcagacctcctcatctgcctagctgtcaccctctgcctcaactgcttggacctcctccacctcatcaggcccctggcgagaaaaacgacctgcagctgttcgtgatgagcgacaccacctacaagatctactggaccgtgatcctgctgaacccctgcggcaacctgcacctgaaaaccaccagcctgaacgccaagaaaatggaagatatgatctgggagagcaaccagcagctgaagtggacccctcacatcctgaagtccgcctctatcgccaagaagcggatcaagctgcggcggaacagcaccagacgggaaatgccttctcaggccacaccttctccacctggaccttggagagccgctctgggcaaagaagtgaagcggagccagagcaagctgagactgagaaacacaagccccttcgacaaaaagggctttgtgatcctgagcaacatgggcggcaaccggtctatctgcctgaccatcgtgttctttctggccccttacttccccatgcctagcagctggtctagcagcggcagaaccagactgcctctgaggccacagagaggccctagacctctgcatagatggctgcagcagaccaccggctgctctcagagaagaggcgactgcccaagaaccatggccggaccatctgcttctctgcaccctgcatctggcagagcctccagaaagacctggcagagaaggctgagagcctgtagagcaggcggacctgctggatgggctagacaggccagaaaacgcaagagagagaagcggtcccagaagtccagacagaaccatctgcagctgaaaagctgcagacggaagatcagcaactggtctaagctgcggagcccctggatcttcgaggccaaaaagagcatgaagagatcccagcggcctcctcggagcatcctgagcctgttcaagaagaagaagcccctgacattcagccccagcgtgtccaagaagaggctgcctaagctgaagggcaagaaacgccggaaagaaatccagcggaaggtggtcaagaaccccagccagcctgtgccactgagaaatgacggcatcaccaacggcaacgacagcacccggtcttgcagcatcagcctgaagaaaagcctggaaaagatgcccctgatgcggagcctgctgtactccagaatgtgcctggtgcagatccccacacacacctgggagcccgactactttgtgtccctgcctatgatgttcagctgggccacacagagctttccagtgggcgccgtgtttctgaccagacctgccattccttgctgtagctgtaccagccactccaatccttggagccagtccacactggccatccggtttatctctgcccctcagccaagcagcagcaccgttacagctgctcctagcggccagtattttgccctgcggagtatgcccaagagccggaaccaggtgctgtttcggagaaatctgaccccaagccagctgcggacactggcccctccatatatgctgctgcctcagtctctgtcccagagcctgtctcggaagcagatcccatctcagtccatgctcgtgcggaccaggctgacactgacaggcactagaagctccggcaccagagcctctccatctgccgtgtgtctgtgctgctggacatgccccagcagaagctttcctgccgcctctccaagcggactgagagcacctgttggagcacaggctcctccagaagtgacactgagagccagctgtgccagctccgccagcaaagcttgtgcaggactttggccttggggagcccaagtgcggatgaagaagaaggacagcaccatcttcatctaccccaggctgaaaaccttcggcgtgccactgggcagcattctgtgtctggctggaagcctgagcacgatgatgatcattagcaccaccagacaagagtgcggcagacgggccagcgtgccctgtagacctatgatcggaagcgccagacctggaccatggcggacaagtgctatgccttctgccatgggagtcgccctgcctaccagctgtgaaagcggaagatctcctcctgccaccggcggaagaatgccaggatctcagtctatcatgatgagctggatgcctccactggctccctgcgctgcttgtccttgttctcctgctcctacactgtgccctgctcaccctgctagagcaccaacagccgtgcctgcctttacacccctgtctgctcatcctgtgccagtgctgtctggatgtcacctggctgtgcggacctccatgcttaccttgctgccaatgatgaccctgaaggccctggtcaagacatggacccagttcagaaactaccccagacggcaccctcacagaagcccaccaacaagctgtcctccactgctcgaggcctttccactgccaagagccagcctgagagctaccgtgcctagacactctagcgtgctggccacaggactgcatctgcataggcagattagcctgcctctgcggggcttcctgctgcatcaaccactgccaggacaacacctgtggctgtcccacagactgagactgcggctgcctagaacaaccgagatccagctgaccatgaacgactccaagcacaagctggaaagccccgctctgaaacaggtgtccccagctagtcctcctacacagcagcctcagacaccccaggattctagacaggtgctggccgtgcctatgagcctggcctgtagcatcaccgtgtccttcgtgggccagatctctaccctggtgctggacgtgtcctccatcagccactggaacggcatctgggaagtgatgcccagaacactggaaggctgcatctccgtgaaggaccaccggacatcccagaaccacagcaagtgcatcaccgagtgtgtgcggacagccctgaacaccaagtgtgaaatttgtgtgaagaacaccgccatcctggctatcaccctgatcaccccacaggaccctcacctggaccctgtgtgtcatccccatagaaggcccggctggaagggacaccacagagtggtgtttagccaccatccttccggcagcaccaagtctcactggcagcagagagaaagaggcggaggccgcagagaaaagaagggctgtagagaggcaagcagagccggccagtttcctgtgtggcggagaacatctagaggcatgtccctgcagtggaagtccggcaatgcctgcacacctctgagatgtcccagcagatctccagccaccttcctgactgccctgaacggctggcatagatctggactgagggcccagaccgccttctttctgctggacatcatcctgcggagagcccggcctacaagctgcagcacatgtagaatgtggtggcggctgccctgcaaagtgaccgaaagctccctggccaagaaaaccctgaccaatcagcctagcttgcccggaccttgtgctagcctgctgtctacactgagccagccaccacctcaggctcctagccaagtttggacagccgctacactgcggtgtcctgctgtgcctgctgctgcatgtccacctctgaagctggctccactgcaagtgaccacaacactgaagctgatcctggtcatgctggaaatcgtgaccgagaacaaagttcggcagaacttcaagcggaactccagcttcttctacaccagcgacagaggctacccctacgatgtccctgactatgcgtcc

SEQ ID NO: 1200 - DNA, 5232 bp, Artificial Sequence
  Polynucleotide encoding the hINV - and HA-extended poly-FSP polypeptide 2D
atgcatcgacggcgctcacggagttgccgggaagaccaaaagcctgtgatggacgatcagcgggaccttatttctaacaatgaacaacttccgatgcttggtaggcggcctggagcaccagagtccaagtgttctaggggcgccctgtacactggtttctccatcctcgtgacactgttgctggcgggacaggcaacaactgcgtatttcttgtatcagcagcaaggaagactggataagcttacagttacatcccagaatctccaacttgaaaacctcagaatgaagcttccgaagcccccaaagcccgtctccaaaatgaggatggcgacaccgctccttatgcaagcccttcccatgggggctctgccccaagggccaatgcagaacgctacaaagtatggaaatatgacagaggatcatgtcatgcatttgcttcaaaacgctgatccccttaaagtttaccctcctctgaaggggagctttccagaaaatcttcgacatctcaagaacacgatggaaacgattgactggaaggtgtttgagagctggatgcaccattggctcctgttcgagatgtcccggcattctctggagcaaaagccgacggacgcacctcccaaggaaagcctggaattggaggacccgagtagtgggctgggcgtcacaaagcaagacctgggacccgtgccgatgcggaagatgcagagcctgaatcaccccagcagactgaccaacaatcctcggagaaagacctggaagatgcggaagaagtacgcccagaagcctagccagaagaaccacctgtaccggcagatcaaccggcgcaagctgcagagaaagaagtccagaagccacctggacttcagcccctactggatgaagaaagtgaagcgggccagaaaccggaacatgaagaaaaccatgagccacctgatcgcccatcaggccctgaagatgtctggcctgagactgtttcaccccagactgctgaccagaaagaagcccggcaagcagaaaaagggccacatgatcttcagccggcggaagtggcagatccggcacgtgctgaagaatctgatccccagcctgaacgcccagtggatgttcctgagaatcgctagcccacagatcatgcagagaaccagcgccgaccggttccggatgaagcggagaatgcagaacctggacaatctgggcgtgccctggcctctgttgcctggattgctgctggcccatatgtacggcttcagcacctacggcacccagaaaggcgagtgcgtgtgtctgcagtgtctgagcggcagcagcctgttcatcctgaagcagcccctggacctgaagatctccaagaccttcatggccagccctcagattatgcagcggatgagcgccgtgaacttcgagacaatcctgcaggcccatcctcaggtgccagctcttgctcctcaagcttggtggcccgctagaagaggccctctgacatctgctccaagcgcacagcagtccctgacacggacactggaaagcgccggactgtttccttggctgcacacccagtgccgggccttcattcacacacctagaagccctggctgcagcgtgtacgccaacatgtgctggcggtacaagaaacggggagtgatcgcctggcggatctaccctcctagcacatgcagcctgccttgcagaggcctgatcctgattcagcacggcggcatcttcaccttccggttctgggtcgagaagctgagctggaacatctgcaagaacctgagcctgtacctggataagttcgtgcagcggctgctgtacgtgtacatcatcgagacaaacgtgttcgtgctgaacctgttccacgtgccagtgaaccagatcttcatgatggccttctacctgaagtacaccgagaaggcctgggtcatggaactggaatggctgatccagcagcagtgctaccagcggaagagaatgaagaccggcgccatccaagagaagggcgctattcaagagaaaggggccatgaccaagcggatctgcgtggtcaatttcgaggcctgcagagagatggaaagcctgagcgcccctgagaagatcaccctgtttgaagcccacatggcccggtgcaccagcatcaatgtgctgtgtgtcagggccagcctgatcgagaaactgatgaaagaaaagcgcaagatgaagcgcaaccaggtggcatcccctcaaatcatgcaacggctgttcatcaagggctaccagaacaaccacttcacgttccacctccaaaacttcgccttcttcagctccttcggcaacaacaagtatatcaacatcctgacctttctgcccagcagattcccttggggacctcctccactgggagcccttagagctacagctcctgctacagctgctccccaggcacagacacctcattggagagccgccaccacaagcagcatgagcagctctccaagagccgagcctaccagctctagctcttgggccacttgctggcctagatgctgcagctccagctgctattggagcctgtctagctggcctcctgctggcgctgccgaagccacaaataccagaaccagaagccgcgagagccagcggggaagaatgctgacttggagaagctccctgtggctgcagggcaccagatgttttacaggcgtgcggaccagctccaggtgcagcctgatggaacagatccctcacctgaagtctaacagccggaagaaactgctcgaggacatgaagcagaacggcttcaccagacggcggaacagcagaaagcagagccaagtgcagctggccatccaggtgctgctggtggacaagcacaagtactttctgttcggcagagccacatttctgctggctctgtgggagtgtagcctgcctcaggctagactgtgcctgatcgtgtctagaaccctgctgctcgtgcagtctagacacccaagctggccttggaccagatgcctgagaatgcggcctccacgcagccactggaactctgcctacctggggagaacactgctcgtgacctgcatcctgtaccacagatggatcgtgaccagcatgtgccagagccagagatggctgacctccaccacctctagaagctctgccctgatgtggacctggtggtgtacaagaggtggcggcaagcggaagaaaaagatgtgcaaggtgtccggcggctgcaccgcctgtgttgaaagatgtccttggaagggcatctgttggaagtggcctgtgacagtggccgccatgagcagaacacctccaagacgcgtgtgcggccacagagagggcagcgagtctgataatctgggcctgctgtactcctttccacctgtgctgttcaaggccgaccagagcgaaagctctctgagcagcggcaacagcgtgatcgtgcacaagatcgtgctggtgttcctgaagtccctgagcagctacaactgcgagagaagaatcagcggcatccagaagagagccatcgagttcgccgtcctgaagctgctgaacatggacctcggcaagggactgacacaccccgtgcctctgaagaggaccctgcagaacaagcggaacaagaacatcaagcgggtcaaccagaagaagggcaacatcaagaggaagtccatcctgctgcatctgattgtgctgaacagccccgagagcaaccgggaaaagatcatcaaccccaccatcagctgcccctttcagagccccacaaagagactgggaagccctcctctgcacctgtgtcagcctctgaggccctatcctatcagcgagggcctgaccatgaccaccggcagaaacatcaacagcaactccctgatgaccaactgcctgttcagccccatcttcctgtgccaccacgccatcatgcaccggaagatgacaagccctcacttcagactgttctccagcaagatcccacatccacaggtcccaagtgtggtggccctgtgcaagtttacacacccctgcaccatgctgctgccccaaggcgctttttggaagcctcctagccagggcatctccagctgtctgatgacaggctgttggcagtggtccagcgtgacaagcctggaatggacagcccaagagagaggctgttcctcctggctgatgaagcaaacatggatgaagtcttggtccctgcgggaccccagctacagatccatcctggaatacgtgtccacacgggtgctgtggatgcccacctctaccgtgcctaagttctttctgaccttcagccagatccggatgtgcgccctgtctcaccctagcttctacatcagctccaccgtgtgctttctgagcaagcactgcatgaccgcctgcacacctggaaccagcctgcagtgttacctgaacctggccaacggcctgtggttcaacctgatcttccggaacaaaaagaccaagctgtggttctccctgattaacatccaccaccgcaagaacccactgctgcccatgcggctggaaaaaaaggccacttggatgcggcggaccgagctgtctctggaaccttggattccttacctgcatcagcagaaaacccagtggctccccatgagaagcctgggcgagccttggcgagctggatttcagtggggagagtctccctggcaagtgatggcctctctgacaggcagacgcaagaaaagagaggatcactgcggactgcaagagaaaaaaagccggaagctgatgtccagctgcgccgctcctccacatagactgctgggacctagcagatggggaagctgtgggagagcctgttcttgtggcagaggctgtggaacccctagaggcgactggaagagacacccacctcggcggattctgtttcacgtgcggaacatcgtgtacggaatccaagtgatgctgtgctgtcaccccgcctggctgtctccaatcagcgcttgtcctcgcctgctgccttatccattccacgttctggccctggaagtgacattccctccaggcactgccatgcctcagatgcaattgcaggcactggcaatgtgggagaaaggctgggacaagcctctggaaaacacacagatccccaggacaagcccactgtggaagatcacaatggtgctgacataccccaactgcgtggtgcacgtcctgatgttcggcggcaagaagcggagcaagttcggctacccctacgatgtccctgactatgcgtcc

SEQ ID NO: 1201 - DNA, 5247 bp, Artificial Sequence
  Polynucleotide encoding the hINV - and HA-extended poly-FSP polypeptide 3D
atgcatcgacggcgctcacggagttgccgggaagaccaaaagcctgtgatggacgatcagcgggaccttatttctaacaatgaacaacttccgatgcttggtaggcggcctggagcaccagagtccaagtgttctaggggcgccctgtacactggtttctccatcctcgtgacactgttgctggcgggacaggcaacaactgcgtatttcttgtatcagcagcaaggaagactggataagcttacagttacatcccagaatctccaacttgaaaacctcagaatgaagcttccgaagcccccaaagcccgtctccaaaatgaggatggcgacaccgctccttatgcaagcccttcccatgggggctctgccccaagggccaatgcagaacgctacaaagtatggaaatatgacagaggatcatgtcatgcatttgcttcaaaacgctgatccccttaaagtttaccctcctctgaaggggagctttccagaaaatcttcgacatctcaagaacacgatggaaacgattgactggaaggtgtttgagagctggatgcaccattggctcctgttcgagatgtcccggcattctctggagcaaaagccgacggacgcacctcccaaggaaagcctggaattggaggacccgagtagtgggctgggcgtcacaaagcaagacctgggacccgtgccgatgcagaacaccagaagcaccaacctggaaaagaaccccagcctgaagaagcagagccagcggagaggaaagctgagcagcagaaagaagggccacaccaagaaccggcggaaggccaagagaaagccccagatcagccagaagaaggaccctgccggcaagctgaagaaacacctgaaccggaagctgcacctgaccagatcctgcctgatcgacctgaccatgatgatgagccagaagctgtggaagaaccagcgcaagagaatccctctgccttctccacggcagcatctgctgcctcagtatccactgcatcctccacctccatgcctgctgctgctccaccacagacaccatctggcctttctcgagatggcctgcagcagccagcacacccacagcatcaagatctggatcagcttcagccacgaggacctgcctagaatgctgcccatcagcagccctctgcacagaccccagatgcctttctggacctgcacctttcctgccaccacatggggcacatgggagacaccttctacatggggctggcggacattcggccctgtgtactacgtgtgcaaccggatgaacgtgtccagcgtgctgaagcctttcctgttcaccgtgcctatcgaggacatgagagagtgcaccctgggcagaaacagaatgaatgtgtcctctgtgctgaaaccctgtctgatccccgtgccaatcctgaccacactgagcttcgtgctgatcgaggaaagccggcggaacagacggtacagaaagatctacggggagctgaagatgtccctgcaggccctgcctctgacctttagcacactgctgtgggacagcagacacaccaccaccacaagcagccccagaagatcccctgctctgagagctagaggcggcaccacaatcggcgaagtgacaagcagaggcgccagcagctctaccagcagagacagcagaagctttttcaccagcgctcaccccagcagaccctgcagaatgagactgtaccagagcaacggcatggaagcctgcggcacacaccctacacctagactgtctagaggccctccactgcacaccagaaccatgagcctgagcaacatcctgatgaagttccggctgatgctgcagaagcagtgctgctacaacctcgtgatcaagcaccctctgatcttccggatcaacctgcggagacagggcaagaccaaagacggcgttgtgcagagcctgggcttcctgaaccagcagatcatcctgcagaaagagttcttcatctgcctgctgatgttcatcaagcggtggaagccagccgccacaaagacacctccaccactgattctgtggcctcaggccgctcctgtgcacaagaagagaggcctgttcagcctgttcttctcccactgcctgtgccaccagatgaagtgcctgaccgccgtggattgtctgcaggccttctgggacatgatgattcgcaagatccagaagcggcggagaaccgccaaccggctgaaaaagaaatacctggtgcagtgtaccaacctgagcgtgcccatgatgctgaccatcctgatctggaagcgggtgttcatcctcctgctgagcgacaagaagtgtctgagagtcagatgcggcggatggctgtgtggctggacacctagaggcaagaacaagaagcggagaaagctgcggcccaagcacctgaagaaaaccagcgccaaggtgtccgtgatcaccatgaagctctgggagaagcacttcaagggcctgaactggaacctggtcgtgtggattctgaacctgaagatgatgtggctcaagaagtccaccaagagcagacagagcagcccattcctggctcggagctggaataccatgcaatggaacaacaagaaaatggccatgaccgtgatcgctggcgcccaccactgtcagtacaagctgacctacaccaaagtgtggaagatgaattggaagaaaatgatgatcggctcccagcacctcctgtttagcccactggattcaagcccactgcagttgctgctgcaccctcacggcaagagatgcaacccttgctgcagactgacctggatgagcagagagtgggaaaagcggaagcagatcctcggcggaggcggcaagtacaaagagtacttcctgaagcggattctcatccggaaggctatgacagtgctggccggcgataagaaaggcctgggaagattcatgagatgcgtgcagagcgagacaaaggccgtgtctctgcagctgcctctcggccgaagaaagtccggcgtgatgaagtgttgggatctgtgccccagactggactttcaccccagatctagctctggcggcgagaagctgaagcactgtttcaaagcctggggcctgtgcttcttctacctgctgtacttcgagaagaaacggcccgagtggctgagcgttgaccctcctggatctgtctggattctgccctgcatggacctggacggaatgctgacagtgatcggccagggactcgtgggcatgacccctagagatctgggaacagtggctggcgccaccgcacagattcagaggcctatccaggtgcagacaggcggcagactgttcctgattcacctgagaaaggtggacacccaccatctgcaggtcgtgaccaagaccgtgacagccacaacagctgacggccagaggatgcggagactgaagtgcaaggcctgtcggctgagatgggccagacctgaacctgctgcacaggctcctccaaagagccactttccacctcatcctagcggcccctccagaacctctagcctgcagctcagacccattcctccacacctgagacacccactgctgctgaagggaaagaacagcccctgctgccaaaagaaactgcgggtgcagaaccagggccatctgctgatgatcctgctgcataacgccagacagcccagcaggcctaccggaagaacccctaccacaagactgatggcccctgtgggcagcgtgatgtcttgtagcctgctgacccagccatctcctgccagcgcatgtacaatgccaccactcctgcatccacagtgggccccacatagtgctggactgtctccaggcgcttgcagacctgcctgtacctgcatcagcatgaccaccatctccagagccacatggcggctgagaatcccaagcctgaggaagtaccggcagaacatcgagatcacccctcagcggtctaaggcccaggtttccgtgtacagcggcaatctgctgagcttctccagacggggcatgaagagtagcgtgcggctgaagaacagcatccctcacgtgccaaaagccaccgccgctcactctgtgacagtgaagctgcagtacctgtttttcctgaccgtgtgcggcttcgaccgggtgttcctggttaagatctgcaagaagaagctgctcctcaagctgctgagaggccccagacggaaagtgctgatggtgctttggctgcccgccaaccagagtctgcagaaaagccaggtgttccagtgggtgctgcggaccgaaacctacatggaaatgcactacggccatcaggcccctcaggtggccatgctgcctaaactgctgtgtagacagatgctccccactctgtccacactccagcagaggcatcctcagggaccttgtcctcctcctgtgacacctctgagagtgcagtctgtgctgctcctgggagtgcctcagacagccgcttttagcggccggattctgcaccagccagaaatggccgccatgagactgatgcccaagttcctgaactccaccaacagctggtggacagtggcccctagatgtcctagaagcgccgtggacattagccccggacctacatctcctagcctggcctcttgtgcctctgtggccattggaaaactggcactgctgggcgcatctgccccttgtggcgcagctggtgctagagaggctggaagatttgccgtgctgggcaccatggttatgaagggtgctgccgcagcctcctgtcagtctcctccatctccaagagagacaacccctagcagcgacgccaccagacggacaagacctattgccgctcagagcaaaaagaccatgactgccgccggactgacccctcggagaaacctgcagagaaatctgaaggtcctgggcgccaagaagatcaccttcctgagaaacagcagacgcgccacacctacctctaagggcagcctgagaagaaagtacctgagagtgaacatccgcaagctcatctggaccaagcagcggagcttcctgtctctgttccccaagctgagagccaccgagcagatgaccaatgtgggatgcctgctcaagaaaagcagccaattgcggcggagctggcgcaatgtgtcccggatcagcaacatggaacacaggctgaccatggacagcgccctgagcctgacaaagagagagggccctgagacaagcgagaagaagaggaagttgcctggctacccctacgatgtccctgactatgcgtcc

SEQ ID NO: 1202 - DNA, 5250 bp, Artificial Sequence
  Polynucleotide encoding the hINV - and HA-extended poly-FSP polypeptide 4D
atgcatcgacggcgctcacggagttgccgggaagaccaaaagcctgtgatggacgatcagcgggaccttatttctaacaatgaacaacttccgatgcttggtaggcggcctggagcaccagagtccaagtgttctaggggcgccctgtacactggtttctccatcctcgtgacactgttgctggcgggacaggcaacaactgcgtatttcttgtatcagcagcaaggaagactggataagcttacagttacatcccagaatctccaacttgaaaacctcagaatgaagcttccgaagcccccaaagcccgtctccaaaatgaggatggcgacaccgctccttatgcaagcccttcccatgggggctctgccccaagggccaatgcagaacgctacaaagtatggaaatatgacagaggatcatgtcatgcatttgcttcaaaacgctgatccccttaaagtttaccctcctctgaaggggagctttccagaaaatcttcgacatctcaagaacacgatggaaacgattgactggaaggtgtttgagagctggatgcaccattggctcctgttcgagatgtcccggcattctctggagcaaaagccgacggacgcacctcccaaggaaagcctggaattggaggacccgagtagtgggctgggcgtcacaaagcaagacctgggacccgtgccgatgaacagaaagaccagaaaggccgccagagagaagcaccgcaagaccgacgacaagaagaagaagtccaccgaaaagaccaagaacgccaagaagatgcccttccagcagcggcctcctctgcagcctgttaacctggatctgcagcaccagcgcagacgcaaaaagaagaaagacaaggtcgaaatccggaatcggagccctaaggccaatagcaccgagtgtcagggcgagcacagcagagagcagaacctgctgaatctggtgcagctgaaccctcacagccctcaccacagaaaggacgaagaggaccaccagaagcggcaccaccaccacaatcaaaagaaaatgagcgtgcgggctagcgtgtccttctggacacttttgccaacaaccggcgtgcggacaagaggctctccactgagactgacactgtggcctccacgggttccaccttctccacctcttgctctgggccccagaatgcagctgtgtacccagctcgcccggttcttccctatcacacctcctgtgtggcacatcctgggacctcagagacacacacctcaggctcctctgaggctgtggtcttggtgcggcacaagccagacctacttcggcagcagaccatctccttgcctgagctggtccagcagaattgtggcccctggacacgccctgagctgtcggactagaagaagatggtctagcaagcggtggatcttctccaaccagctgaccgtgcagatgctgtgcctgccaatcacacacccattcgcctctcagcctctgggacaagagatgcccaacaacacccagatccggctgctgaagccctgcagagtgaacgccgtggaagaactgcacagcaggcggatgtctgtgcggatcgtgaagaactgggtgtcctgctgttacgtgcggctgtctgctgtgggcctgtctacttggagtgccctggacgaggaaaagaagaacggccggatcagcagcctgaaaaagaaagtgaatgcctgcagctccctgatcctgagcttccagcgcgtgaaaaccggcatggaaatcctgctgtggattctgctgaagatggaaattcagatcttcaagatttgcctgggcgagatgcagctctgcggccaggcctttggaagctttagcgccgatttcagcgcccctcagatcattaagaagatgaagaaacggatcatggtgcacgagctgaagaagaatctgctgctgcctatgtgctccagcctggctctgccaacaggcctgacatctctgatcctgcctagcagcgatctggccgtgctgatctctagctccaccagccactttctgatgcggagccctgtgctgccaagcagcagactgacttgtgcctctccacagctgccccggatgtggacttggtctagctggctgaagaacgagggcaacaaccactggcctagagtggaaatgcctaccggctggctgctcgtcggctacaacaccagaaacacagcccagaatcctcggctgcagcagcacctgaaacactggcagcagtgcaccagagccagatggtgtcaagagccctgtcagaccctgaccttcttccatttcttcttctttttcaaaacggtgtccctgtgttgccccggctggtctaaaggacaacctcctccacctggcctgaagccttctagcctggcttctcaggtggccagaaccacaggcgtgtaccagcacgtgtggctgatctgtttcgtgtttttcgtgtgtgtggaaaccggcttctgtcacgtggcccaagtgggactcgagagactggtgtctctgtccggcatcaccgacgtgaaccattgggcccagcctaagccatctcctagcaaaggcaccggcatgaacagacccatcggcctgagagttggcaaaggcgtgtgggccagactgatcctggccatgacactgaccctgaacggcatggccaagaagtcccagcagcctctgcaggtcgtgctgagactgggaaacctgcctccattcttcagaggcagcgaggtgccctttcctagaccttgtcggaccaagcctgcctgcacaagcaaggcctggactcccagaaaactcgtggggagagccgtgcggagaaagggatctccactctgggattgctccaccacaacaggcacacaccacggatgcctgtgggagatcccatctgtgaccctgctggcccatcctagaaccgcctctatcaccctgcctaccacaagcctgaagggctccagaaccagctgctgccctagatctcaccccagactgcctaggaccaaatggcccctgcagtgtctgctgcacagcctgggaacaaccggaacactcgtttgggaaaggggcgtcctgcagatgagatccctcgaagcccattgtccactgcagaccttccatctgcaccactgcaggacccagcctagctcttgtcctcctgcctggattctgtaccaaggacagtggagcggagccgtcgtgggacttagacctgtggctcaccatctgcctagacctatccagggcctgcactgtccacaggcacctcatcaacctgctctgagctggggaaaatggcccgtgggaatgacaggccctgccagatgttgcagatggcccagacggtgccagaagaaggttccatcagcctctccatggggcctcgtgctcaaaaagaaccggaaacagatgctgaaccagaagtgtctggccccttttagagagagcaccctgggcaatttctggatgaagctgctccagctgcctgtcgtgatcaacctgaagagactgcagaagttcaacctgcacctgtgctactaccacagccagagcaacagaaacaagagccgccagatggaatccctgggcatgaagttgcagtcccagaaatcccagcaccactgtgccctgcggaagatcgagtgggccacaaagttgtctctcggcggaaaagccggaccacaggctcaagagaaggccacctctcggattctgaacctgcaagtgctcaagaagatcctgcggagctttatgaagctgtaccactctctggtcatgtgcctgcggctgaggaccaagctggaaaaggctctgagcgccctgttcatctggccccagcacagctacaagcccctgttctttcacggcgacctgtgcgagtggggaggccaggctcatagacagcggaactggctgaaaaactggaagcggttcaagcttaaaaagaagtacatccagaagaagaagcagaagtctaacaagatcatctgcaagggccaccgcatcaccatcatctgtatcaagaatatgttcctgcagcgcaagggcttcctgaacctgagccacgtggaaaagttctgtagaggcggccctagcgccagcgatagatgctgttcttgtagccccagcggcttcagtgccggcagaggaagatgtcctgttcagggctgtctgaggccccacagagttcaactgctgagaagatggggccctggctctcctgctggacagaggctgtctaagggctttcagctgctccgttggtggggaccaggatctcctgctcctgagcctagaaagggcccatttccaccacctgatcctccatggcctgtgaccgctgtgacagtgatggctggatctgtgcctagtgctcagtctgtggacgccctggaatctcctggacctctggctctcgaaggacctagcagccctagaaacctgctttggagagagatgagcatctttctgcccggcatcttcaccgccaagaaaagccccaccagcttttgctgcaatatcctgaacagcctgccaagctctatggaaatcgccgtgctgcaagaggacagcaaaaagatgacccagaagggccaagccttcggctccctgtgtcagcttgtgtccgctgacttctctgcccctcaagtgacccggctgcggagcctgaatcatctgctgatcacctacacaccccacatctgcagacacaccctgctgacccctgacaccagatggatctttagcaatcagctgcagacagtccagatgctctgtctgcctccactgaagcagggcgagagaatcatttggcccctcggcggctttcagatccccaacttcttttggagcctcggcatcggacacactggcgcctggtggcatactggaaggcggagaagagaatggggcggcagcaccgtgtctagaagccctctgtggatcagctccatgatctacctgagaggcatggccttcgccagcgacagcagcatcagaaccaccagagtgtcctggtgcagaagatgcggcgccaaaagcgctgccgccagctctattgaagctctgaccgctctgtttacctgccggaccgccagcatcagcgtgaacatcagcaccctgatgtccatcctggaagcacttaagaagaaacccagagacatctgccgcatcagctgccggtgtagacgcgagtacagagtgactatgggctacccctacgatgtccctgactatgcgtcc

SEQ ID NO: 1203 - DNA, 4690 bp, Artificial Sequence
  Cloning cassette hTPA 1C
gaattcggatcccgcgacttcgccgccatggatgcaatgaagagagggctctgctgtgtgctgctgctgtgtggagcagtcttcgtttcgcccagccaggaaatccatgcccgaagcaccagacgggaaatgccttctcaggccacaccttctccacctggaccttggagagccgctctgggcaaagaagtgaagcggagccagagcaagctgcggctgagaaacacaagccccaccgagatccaattgaccatgaacgacagcaagcacaagctggaaagccccgctctgaaacaggtgtcccctgcctctccacctacacagcagcctcagacaccccaggatagcagacaggtgctggccgcttcttctcctggacatcctcttggccctggcgactgccctagaacaatggctggaccttctgcctctctgcacccagcatctggcagagccagcagaaagacctggcagagaaggctgagagcctgtagagctggtggacctgctggatgggctagacaggccatgacactgaaggccctggtcaagacctggacacagttcagaaactaccccagagtcggagccggaacaggcggaggacctgcttgtgttcctgtggccgaagcttctactggcgcctggacagctgaaggcgctgccggaacaagatgcagagcttctagagccccttgcagacagctgcctgccagctctcctaccaagtgcgagatctgcgtgaagagaaggcggcggagaaagcggagcagccagtctagatctcccgtgcctaagaaacgcgagcggatgatgctgcctgtgcgggccagaacagctagatctgctctgccacaaggcagagcccctctggaaggaatgcttctgcctagagcactgcccagcctgctgagcagaatgccagccagaagagagagccggttttggctggcactgcaggctctgggactcagacctcctcatctgcctagctgtcaccctctgcctcaactgcttggacctcctccacctcatcaggcccctttcgacaagaaaggcttcgtgatcctgagcaagggcaagaagcgccggaaagaaatccggcggatgaccagacggaccatgaccaccaccaaaatgatgatgatgcggcggaccaagcggcggaggcgaaaacgtagaagaatgaccatgatgacccgcagaaccctgctgaccaagaaaacctgtctgacccctagaaccagcgccgccacaaaagctctgcccagacagacaatcagccagcggaggcctatccagacacctcctggaacaagcctggccatctggggcagactgcctctcagaccacagagaggacctcggcctctgcatagatggctgcagcagacaacaggctgctcccagagaagaatcgccaagaagcggatcaagctgaggcggaacacactggccatccggtttatctctgcccctcagcctagcagcagcaccgttacagctgctcctagcggccagtacttcagcagcttcttctacaccagcgaccggaccaagtgtgaaatctgtgtcaagaacaccgccatcctggctatcaccctgatcacccctcaggaccctcacctggaccctgtgtgtcacccacatagaaggcctggctggaagggccaccacagagtggtgtttagccaccatccaagcggctccaccaagagccattggcagcagagagaaagaggcggaggccgcagagaaaaaaagggctgcagagagatgcccagcagctggtctagctctggcagaaccgccgacaaaaagaacgtgcggagcagaaccagactgaccctgacaggcacaagaagcagcggcacaagagcctctccaagcgccgtgtgtctgtgctgttggacatgcccctccagaagcttccctgccgcatctccatctggactgagagcacctgttggagcccaggctcctcctgaagtgacactgagagccagctgtgcctctagcgcctctaaagcctgtgctggactttggccttggggagcccaagtgcggaacaaagtgcggcagaacttcaagcggaacctggccaaaaagaccctgactaacgccctgcggagtatgcccaagagcagaaaccaggtgctgttcagacggaatctgaccccaagccagctgagaactctggcccctccttacatgctgctgccccagtctctgtctcagagcctgtccagaaagcagatccccagccaatcaatgctcgtgaccgccttcttcctgctcgacatcatcctgagaagcctgctgtactcccggatgtgcctggtgcagatccctacacacacctgggagcccgactacttcgtgtccctgcctatgatgttcagctgggccactcagagctttccagtgggagccgtgttcctgaccagacctgccattccttgctgcagctgtaccagccacagcaacccttggagccagtccttcaagaagaagaagcccctgacattcagccccagcgtgccaatgtctctggcctgtagcatcaccgtgtccttcgtgggccagatcagcacactggtgctggacgtgtcctccatctctcactggcgcaagcgcaagagagagaagcggtcccagaagtcccggcagaaccatctgcagctgaagtcctgcagacggaagatcagcaactggtccaagctgagatccccgtggatcttctaccctcggctgaaaaccttcggcgtgccactgggctctatcctgtgtctggcaggctccctgagcacgatgatgatcattagcaccaccagacaagagtgtggcagacgggcctccgtgccttgtagacctatgatcggcagcgctagacccggaccttggcggacatctgctatgccatctgccatgggagtcgccctgcctaccagctgtgaaagcggaagatctcctcctgccaccggcggaagaatgcctggatctcagtctatcatgatgagctggatgcctccactggctccctgtgccgcttgtccttgttctcctgctcctacactgtgccctgctcatcctgcaagagcccctacagccgtgcctgcctttacacctctgtctgctcaccctgtgccagtgctgtctggatgtcacctggccgtgcgcacctctatgctgacactgctgcccatgagacaccctcacagaagcccacctacaagctgccctccactgctggaagctttcccactgccaagggccagcctgagagctaccgtgcctagacacagctctgtgctggccactggactgcatctgcatcggcagattagcctgcctctgaggggcttcctgctgcatcaacctctgcctggacaacacctgtggctgtcccacagactgaggctgagactgccaagaacaggcgagaagaacgacctccagctgttcgtgatgagcgacaccacatacaagatctactggacagtgatcctgctgaacccctgcggcaacctgcacctgaaaaccacatctctgcggagagccagacctacctcctgcagcacatgcagaatgtggtggctgaagctggccccactgcaagtgaccacaacactgaagctgatcctggtcatgctggaaatcgtgaccgaagaggccaagaaatccatgaagagatcccggcggagcaagatcgaggcctctcctatcggctccatcatgaagaagaaagacagcaccatcttcatcaaccagcagctcaagtggacccctcacatcctgaagtctgccagcgtgtccaagaagagactgcccaagctgaacggcatctgggaagtgatgccccggacactggaaggctgcatcagcgtgaaggaccaccggacaagccagaaccacagcaagtgcatcaccgagtgtgtgcggacagccctgaaccagagaaaggtggtcaagaaccccagccagccagtgccactgagaaacgacggcatcaccaacggcaacgactccaccagatcctgctccatcagcctgaagaaaagcctggaaaagatgcccctgatgaacgccaagaaaatggaagatatgatctgggagagcaacatgggcggcaaccggtccatctgcctgacaagactgccctgcaaagtgaccgagtccagccaaagaccacctcggagcattctgtccctggcctctagagccggacagtttcccgtttggcggagaaccagcagaggcatgtccctgcagtggaagtccggcaatgcctgcacacctctgaggtgccctagcagaagccctgccacatttctgaccgcactgaacggctggcacagatctggacttagggctcagcaacctagcctgccaggaccttgtgctagcctgctgtctacactgagccagcctccaccacaggctccaagccaagtttggacagccgccacactgagatgtcccgctgttcctgcagctgcttgccctcctatcgtgttctttctggccccatacttccccacaccactgagcatcagcagacccacctctcgggccagacagtcttgttgtctccccggactgacacaccctgctcaccagcctcttggctctatgggctacccctacgatgtccctgactatgcgtcctaaaggcgcgcctagcggccgc

SEQ ID NO: 1204 - DNA, 4672 bp, Artificial Sequence
  Cloning cassette hTPA 2C
gaattcggatcccgcgacttcgccgccatggatgcaatgaagagagggctctgctgtgtgctgctgctgtgtggagcagtcttcgtttcgcccagccaggaaatccatgcccgacggcagatcaacagacggaagctgcagagaaagaagcgccggaagaagagagaggaccactgcggactgcgggccagaaaccggaacatgaagaaaaccatgagccacctgatcgcccatcaggccctgaagatgtctggcctgagactgtttcaccccagactgctgacacggaagaagcctggcaagaaccctcggagaaagacctggaagatgcggaagaagtacgcccagaagcctagccagaagaaccacctgtacggcaagggcctgacacaccctgtgcctctgaagagaaccctgcagaacaagcggaacaagaacatcaagcgcgtgaaccagaagaagggcaacatcaagagaaagagcatcctgctgcacctcatcgtgctgaacagccccgagagcaacctgcaggctcatcctcaagttccagcactggctcctcaggcttggtggcctgctagaagaggccctctgacaagcgctccatctgctcagcagagcctgaccttcctgcctagcagatttccttggggccctcctccactgcactggaactctgcctacctgggcagaacactgctcgtgacctgcatcctgtaccacagatggatcgtgaccagcatgtgccagagccagagatggctgaccagcaccacctctagaagcagcgccctgatgtggacccagtggtctagcgtgacaagcctggaatggacagcccaagagaggggctgtagcagctggctgatgaagcagacctggatgaagtcttggagcctgcgggaccccagctacagatccatcctggaatacgtgtccaccagagtgctgtggatgcccacatctacagtgggagccctgagagccacagctcctgcaacagctgctccacaggctcagacccctcattggagagccgccacaacaagcagcatgagcagcagccctagagccgagcctacaagctctagctcttgggccacctgttggcccagatgttgcagctccagctgttactggtccctgtcctcttggcctcctgctggtgctgccgaggccacaaataccaggaccagaagcagagagtcccagcggggcagaatgctgacttggagaagcagcctgtggctgcagggcaccagatgttttacaggcgtgcggacctccagcagacacccttcttggccttggaccagatgcctgagaatgcggcctcctagaagcaacagccggaaaaagctgctcgaggacatgaagcaaaatggcttcacccggtacaagaaacggggcgtgatagcctggcggagagccactttcctgctggccctttgggagtgcagtctgccccaagctagactgtgcctgatcgtgtctaggaccctgctgctggtccagagcagatgcagcctgatggaacagatccctcacctgaagtcctggtggtgtacaagaggcggcggaaagcggaagaaaaagatgtgcaaggtgtccggcggctgcaccgcctgtgttgaaagatgtccttggaagggcatctgctggaagtggcctgtgacagtggccgctctgatcctgattcagcacggcggcatcttcaccttccggttctgggtcgagaagctgtcctggaacatctgcaagaatctgtccctgtacctggacaagttcgtgcagcggctgctgtacgtgtacatcatcgagacaaacgtgttcgtcctgaacctgttccacgtgccagtgaatcagatcttcatgatggccttctacctgaagtacaccgagaaggcctgggtcatggaactggaatggctcattcagcagcagtgctaccagttgctgctggctcatatgtacggcttcagcacctacggcacccagaaaggcgagtgcgtgtgtctgcagtgtctgagcggcagctccctgttcatcctgaagcagccactggacctgaagatcagcaagaccttcatgagcagatcccacctggatttcagcccctattggatgaagaaagtgaaggcctctccacagatcatgcagcggatgagcgccgtgaacttcgagacaatcaggcggaagtggcagatccggcacgtgctgaagaacctgcctctggaaaacacacagatccccaggacaagccctctgtggaagatcacaatggtgctgacataccccaactgcgtggtgcatgtgctgatgttcgtgctgttcaaggccgaccagagcgagtctagcctgagcagcggaatctaccctcctagcacctgtagcctgccttgccggggcattagaatgtgcgccctgtctcaccctagcttctacatcagcagcaccgtgtgctttctgagcaagcactgcatgaccgcctgcaccagagagaagatcatcaaccccaccatcagctgcccctttcagagccccacaaagagactgggccacagagagggcagcgagagcgataatctgggcctgctgtactcctttcctccttggctgcccatgagatccctgggcgaaccttggagagctggctttcagtggggagagtccccttggcaagtgatggctagcctgaccggcaacagcgtgatcgtgcacaagatcgtgctggtgtttctgaagtctctgagcagctacaactgcgagcggcggatctctggcatccagaagagagccatcgagttcgccgtcctgaagctgctgaacatggacctggctagccctcagattatgcagagaaccagcgccgaccggttccggatgaagcggagaatgcagaacctggataacctgggcgtgccctggccattgcttccaggtgctgctcctccacatagactgctgggcccctctagatggattctgtttcatgtgcggaacatcgtgtacggcatccaagtgatgctgtgccggcggagaaacagcagaaagcagagtcaggtgcagctggccattcaggtcctgctcgtggacaagcacaagtactttctgttcggcccctatcctatcagcgagggactgaccatgaccaccggccggaacatcaacagcaactccctgatgaccaactgcctgttcagccccatcttcctgtgccaccacgccatcatgcaccggaagatgacaagcccacacttcagactgttctccagcaagatcccacatcctcaggtgccaagtgtggtggccctgtgcaagttcctggccaatggcctgtggttcaacctgatctttcagaaaaagggccacatgatctttagccccaagttcttcctgacctttagccagcggaccctggaatccgccggactgtttccatggctgcacacccagtgccggaacaaaaagaccaagctgtggttttccctgatcaacatccaccaccgcaagaatcctctgctgcctatgagaatgagcagaacacctcctcggagagtgtgcggatctccacctctgcatctgtgccaacctctgagaggcggcaagaagagaagcaagttcgccttctggaagcctcctagccagggcatcagctcttgtctgatgacaggctgttggggctcctgtggcagagcttgttcttgcggaagaggctgcggtacacccagaggcgactggaaaagacacccacctcgcagagagctgagcctggaaccatggattccttatctgcaccagcaaaagacccagcggaagcggatgaagaccggcgccattcaagagaagggcgctatccaagaaaaaggcgcaatgaccaagcggatctgcgtggtcaatttcgaggcctgcagagagatggaaagcctgagcgcccctgagaagattaccctgttcgaagcccacatggcccggtgcacctccatcaatgtgctgtgtgtccgggccagcctgattgagaagctgatgaaagaaaagcgcaagatgaagcgcaaccaggtggcatcccctcaaatcatgcaacggctgttcatcaagggctaccagaacaaccacttcacgttccacctccaaaactttgccttcttcagctccttcggcaacaacaagtatatcaacattctcacccgggccttcatccacacacctagaagccctggctgttccgtgtacgccaatatgtgctggcggaagatgcagtccctgaatcaccccagcagactgaccaactgtcaccccgcttggctgagccccattagtgcttgtcctaggctgctgccctatccttttcacgtgctggcactggaagtgacctttccacctggcacagccatgcctcagatgcaattgcaggcactggctatgtgggagaaaggctgggacaagcaagagaagaaatcccgcaagctgatgtcctcctgcctggaaaaaaaggctacctggatgcggagaacccctggcacaagcctgcagtgttacctgaacacacacccctgcaccatgctgctgcctcagggaatcccatctctgaacgcccagtggatgttcctgcggatcggctacccctacgatgtccctgactatgcgtcctaaaggcgcgcctagcggccgc

SEQ ID NO: 1205 - DNA, 4687 bp, Artificial Sequence
  Cloning cassette hTPA 3C
gaattcggatcccgcgacttcgccgccatggatgcaatgaagagagggctctgctgtgtgctgctgctgtgtggagcagtcttcgtttcgcccagccaggaaatccatgcccgacctattcctccacacctgagacaccctctgctgctgaagaacaagaagcggagaaagctgcggcccaagagcagaaagaagggccacaccaagaaccggcggaaggccaagagaaagccccagatcagaaacagccgcagagccacacctaccagcaagggcagcctgagaagaaagtacctgagagtgggagccgccgctgctagctgtcaatctcctccatctcctagagagacaacccctagcagcgacgccaccagaagaaccagacctatcgccgctcagagcaagaaaaccatgacagccgccggactgacccctagccagaagaaagatcctgccggcaagctgaagaaacaggtgtccgtgtacagcggcaacctgctgagcttctctcggagaggcatgaagtctagcgtgcgcctgaagaactgcaccaacctgagcgtgcccatgatgctgaccatcctgatctggaagcgggtgttcatcctgctgctgtccgacaagaaatctatccctcacgtgcccaaggccaccgccgctcattctgtgacagtgaagctgcagagccggcggaacagacggtacagaaagatctatggcgagctgaagatgtccctgcaggccagcaatggcatggaagcctgtggcacacaccccacacctagactgtccgtgtccgtgatcaccatgaagctgtgggagaagcacttcaagggcctgaactggaacctggtcgtgtggattctgaacctgaagatgatgctcaagaagaagtatctggtccagcgcgagtgggagaaacggaagcagattcttggcggcggaggcaagtacaaagagtacttcctgaagagaatcctcatccgcaaggccatgacagtgctggccggcgataagaaaggcctgggcagattcatgagatgcgtgcagagcgagacaaaggccgtcagtctgcagctgcctctgggcagaatggacctggatggaatgctgaccgtgatcggccagggactcgtgggcatgacacctagagatctgggaacagtggctggcgccaccgcacagattcagaggcctattcaggtgcagacaggcggcagactgagaggccctagaagaaaggtgctgatggtgctgtggctgcccgccaatcagagcctgcagaaaagccaggtgttccagtgggtgctgagaaccgagctgcccctgacctttagcaccctgctgtgggacagcagacacgacctgcctagaatgctgcccatcagcagccctctgcacagaccccagatgcctttctggacctgcacctttcctgccaccacatggggcacatgggagacaccttctacatggggctggcggacctttgccagacagccttctagacccaccggcagaacccctaccaccagactgatggctccagtgggcagcgtgatgagctgtagcctgctgacacagccatctccagccagcgcctgtacaatgcctccactgctgcatcctcagtgggcccctcattctgctggactttctccaggcgcttgcagacctgcctgtacctgcatcagcatgaccacaatcagcagggccacctggcgcagaaacctgcagagaaacctgaaagtgctgcggctgagaatccccagcctgcggaagtacagacagcagaacacccggtccaccaacctcgagaagaacccatctctgaagaagcagagccagaggcggggcaagctgtctctgaccacactgagcttcgtgctgatcgaggaactgctgaaaaagagcagccagctgcggagaagctggcggaacgtgtccagaatcagcaacatccggaagctgatttggaccaagcagcggagcttcctgtctctgttccccaagctgagagccaccgagcagatgaccaatgtgggctgtagactggattttcaccccagaagcagctccggcgacagagtgttcctggtcaagatccagagcagcccattcctggccagatcctggaataccatgcagtggaacaacaagaaaatggccatgactgtgatcgctggcgcccaccactgtcagtacaagctgacctacaccaaagtgtggaagatgaattggaagaaaatgatgatcggcagccagcacctcctgttctccccactggatagctctccactccagctgctgctgcacccacacggcaagagatgcaacccctgttgtcggctgacatggatgagccacctgaatcggaagctgcacctcaccaggtcctgcctgatcgacctgaccatgatgatgagccagaaactgtggaagaatcagcggaagcgcatccctctgccttctccaagacagcatctgctgcctcagtatcctctgcaccctcctccaccttgtctgctgcttctccaccatagacaccacctggcattcctcgagatggcctgtagctctcagcacacccacagcatcaagatctggatcagcttcagccacgagacaatgagcctgtccaacatcctgatgaagttccggctgaccaccaccacaagcagccccagaagaagccctgctctgcgagctagaggcggcacaacaatcggcgaagtgaccagcagcctgttctttagccactgcctgtgcgtggcccctagatgtcctagatctgccgtggacatcagccccggacctacatctccttctctggcctcttgtgcctctgtggccattggaaagctggcactgcttggcgcctctgctccttgtggtgctgctggcgctagagaggccggaagatttgctgtgctgggcaccatggtcatgaagaacatggaacacagactgaccatggacagcgccctgagcctgacaaagagagagggccctgaaacaggccccgtgtactacgtgtgcaaccggatgaatgtgtccagcgtgctgaagcctttcctgttcaccgtgcctatcgaggacatgagagagtgcaccctgggacgcaacagaatgaatgtctcttccgtgctgaaaccctgtctgatccccgtgccaatctgcaagaagaaactgctgctcaagctgctgaggggcgcctccagctctaccagcagagatagcagaagctttttcaccagcgctcaccccagcagaccctgcaggatgagactgtaccagatgctgcagaagcagtgctgctacaacctcgtgatcaagcaccctctgatcttccggatcaacctgcggagacagggcaagaccaaagacggcgttgtgcagagcctgggcttcctgaaccagcagatcatcctccagaaagagttcttcatctgcctgctgatgttcatcaagcggtggaagccagccgccaccaagaagggcaagaacagcccctgctgccagaaaaaactgcgggtgcagaaccagggccatctgctgatgattctgctgcacaacagaggcccacctctgcataccagattcgagaaaaagcggcccgagtggctgagcagaaaatccggcgtgatgaagtgctgggatctgtgccctgccttcagcggcaggattctgcaccagccagaaatggccgccatgagactgatgcccaagttcctgaactccaccaacagctggtggacagtgcacaagaagagaggcctgttccaccagatgaagtgtctgaccgccgtggactgtctgcaggccttctgggatatgagcgagaagaaacgcaagctgcctatgattcgcaaaatccagaagcggcggagaaccgccaaccggaacatcgagatcacccctcagagaagcaaagcccacctgaagaaaacctccgccaagggcgccaagaaaatcaccttcctgtgcctgagagtcagatgcggaggctggctgtgtggctggacaccaagaggatggctgaagaagtccaccaagtccagactgtgcttcttctacctgctgtactacctgtttttcctgaccgtgtgcggcttcacccctccaccacttattctgtggcctcaggcagcccctggcgagaagctgaagcactgttttaaagcctggggcgtcgaccctcctggcagcgtttggattctgccctgcttcctgattcacctgagaaaggtggacacccaccacctccaggtggtcaccaaaacagtgaccgccacaacagccgacggccagaggatgagaaggctgaagtgcaaggcctgccggctgagatgggctagacctgaacctgcagctcaggcccctcctaagagccactttccacctcatcctagcggcccctccagaaccagctctctgcaattgagaacctacatggaaatgcactacggccatcaggccccacaggtggcaatgctgcctaaactgctgtgtcggcagatgctccccactctgtctaccctgcagcagagacatcctcagggcccatgtcctcctccagtgacacctctgagagtgcagtctgtgctgctgctcggagtgcctcaaacagctggctacccctacgatgtccctgactatgcgtcctaaaggcgcgcctagcggccgc

SEQ ID NO: 1206 - DNA, 4690 bp, Artificial Sequence
  Cloning cassette hTPA 4C
gaattcggatcccgcgacttcgccgccatggatgcaatgaagagagggctctgctgtgtgctgctgctgtgtggagcagtcttcgtttcgcccagccaggaaatccatgcccgagacagcaagaagatgacccagaagaaccgcaagacccggaaggccgccagagagaagcacagaaagaccgacaacctggacctgcagcaccagcgcagacgcaaaaagaagaaggacaaggtcgagatccggaatcggagccctaaggccaatagcaccgagtgtcagggcgagcacagcagagagcagaacctgctgaacctggtgcaattgaaccctcacagccctcaccaccggaaggacgaggaagatcaccagaagagacaccaccaccacaatcaaaagaagatgtccgtcaacgagggcaacaaccactggcctagagtggaaatgcctaccggctggctgctcgtgggctacaacaccagaaacacagcccagaatcctcggctgcagcagcacctgaaacactggcagcagtgcaccagagccagatggtgtcaagagccctgtcagaccctgaccttcttccacttcttcttctttttcaaaacggtgtccctgtgctgccccggctggtctaaaggacaacctcctccacctggcctgaagccttctagcctggcttctcaggtggccagaaccacaggcgtgtaccagcacgtgtggctgatctgcttcgtgtttttcgtgtgcgtggaaaccggcttctgtcacgtggcccaagtgggactcgagagactcgttagcctgagcggcatcaccgacgtgaaccattgggcccagcctaagccatctcctagcaaaggcaccggcatgaacagacccatcggcctgagagttggcaaaggcgtgtgggctagactgtggctgaagaactggaagcggttcaagctcaaaaagaaatacacaggcatggaaatcctgctgtggattctgctgaagatggaaattcagatcttcaagatttgcctgggcgagatgcagctgtgcctcaagaagaaagtcaacgcctgcagcaacgccaagaaaatgcccttccagtgccggtgcagacgcgagtacagagtgaccatgattcagaagaagaaacagaagtccccgctgttcttccacggcgacctgtgcagaccttctccttgcctgtcttggagcagcaggatcgtggctcctggacacgccctgagctgtcggactcgtagaagatggtccagcaagatggccaagaagtcccagcagcctctgtgtagaggcggcccttctgccagcgatagatgctgtagctgtagccccagcggctttagcgctggaagaggcagatgtcctgtgcagggatgtctgaggccacacagagttcagctgctgagaagatggggccctggatctcctgctggccagagactgtctaagggcttccaactgctgcgttggtggggaccaggatctccagctcctgagcctagaaagggcccatttccaccacctgatcctccatggcctgtgaccgctgtgacagtgatggctggctctgtgcctagcgctcagtctgtggatgctctggaatcccctggacctctggctctcgaaggccctagcagccctagaaacctgctctggcgggaaatgagcatcttcctgcctggcatcttcaacctgcacctgtgctactaccacagccagagcaaccggaacaagagccggcagatggaatccctgggcatgaagctgcagatcacacacccattcgccagccagccactgggccaagagatgcccaacaacacccagatcagactgctgaagcccggccaggcctttggcagcttttccgccgatttttcagcccctcagcaggcccctctgagactgtggtcttggtgcggcacaagccagacctacttcggctctatcgaagccctgacagccctgttcacctgtagaaccgccagcatcagcgtgaacatcagcaccctgatgagcatcctggaagccatcctggccatgacactgaccctgaatggcagccctctgtgggactgcagcacaacaacaggcacacaccacggctgcctgtgggagatcccttctgttaccctgctggctaccgccaaaaagagccctaccagcttctgctgtcagcggcctcctctgcagccagtggaagagaagaagaacggccggatcagcagcgtgccaccttctccacctcttgctctgggccctagaatgcagctctgcacccagctggcccggttcttccctattacacctcctgtgtggcacatcctgggacctcagagacacacccctctgctgacccctgacaccagatggatcttctccaaccagctgcagaccgtgcagatgctgtgtctgcctccactgaagcagggcgagagaatcatctggcctctcggcggctttcagatccccaacttcttttggagcctcggcatcggacacactggcgcctggtggcatactggaaggcggagaagagaatggggcggcagcaccgtgtctagaagcccactgtggatcagctccatgatctacctgagaggcatggccttcgcctccgacagcagcatcagaaccaccagagtgtcctggtgtcggagatgtggcgccaaaagcgccgcagccagcagcgacaagaagaagaaaagcaccgaaaagaccaagaacaagatcatctgcaagggccacagaatcacccaggtggtgctgagactgggcaacctgcctccattcttcagaggcagcgaggtgccctttcctagaccttgccggaccaagtgccagaagaaggttccaagcgcctctccttggggactgcacccaagaacagcctccatcacactgcctaccaccagcctgaagggcagcagaacaagctgctgccccagatctcaccccagactgcccagaacaaagtggcctctgcagtgcctgctgcacagcctgggaacaactggaacactcgtgtgggaaaggggcgtgctgcagatgagaagtctggaagctcactgccctctgcagacattccacctccaccactgcagaacccagcctagctcttgtcctccagcctggattctgtaccaaggacagtggagcggagccgtcgtgggacttagacctgtggctcaccatctgccaagacctatccaggggctgcactgtcctcaggctcctcatcaaccagctctgtcctggggaaagtggcccgtgggaatgacaggacccgccagatgttgccggtggcctagaagaatgtgtagctctctggccctgccaaccggcctgacatctctgatcctgcctagcagtgatctggccgtgctgatctctagctccaccagccactttctgatgcggagcccagtgctgccaagcagcagactgacatgtgcctctccacagctgcctcggatgtggacatggtctagctggctgaaagagtggggaggacaggcccacagacagcggaactgtagagtgaacgccgttgaggaactgcacagcaggcggatgtctgtgcggatcgtgaagaattgggtgtcctgctgttacgtgcggctgagtgcagtgggactgtctacttggagcgccctggattccctgatcctgtccttccagagagtgaaaaccagccggatactgaacctccaggtgctgaagaagatcctgcggagctttatgaagctgtaccactctctcgtgatgtgcctgcggctgcggaccaagctggaaaaagctctgagcgctctgtttatctggccccagcacagctacaaaggccaggcattcggaagcctgtgccagctggtgtctgccgatttcagcgcccctcaagtgaccagactgcggagcctgaaccatctgctgattcggtggatctttagcaatcagctgacagtccaaatgctctgcctgccgatcatcaagaaaatgaagaaacggatcatggtgcacgtcttgaagaagaatcggaagcagattatctgtatcaagaatatgttcctgcagcggaagggattcctgaacctgagccacgtggaaaagttcagagagagcaccctgggcaatttctggatgaagctcctgcagctgccaccagcttgcacctctaaggcctggacacccagaaagcttgtggggagagccgtgcggagaaagggcgtcgtgatcaacctgaagagactgcagaaattccgggctagcgtgtccttctggactctgctgcctacaacaggcgtgcggacaagaggctctccactgagactgactctgtggcctccaagaagccagaaaagccagcaccactgcgccctgagaaagatcgagtgggccacaaagctgtccctcggcggcaaagcaggaccacaggctcaagagaaggccaacatcctgaacagcctgccttcctctatggaaatcgccgtgctgcaagaaatgctgaaccagaagtgtctggcccctttcgagcttaagaagaacctcctgctgccaacctacacaccccacatctgtcggcacacccttaaaaagaagcccagagacatctgcagaatcagcggctacccctacgatgtccctgactatgcgtcctaaaggcgcgcctagcggccgc

SEQ ID NO: 1207 - DNA, 4690 bp, Artificial Sequence
  Cloning cassette hTPA 1D
gaattcggatcccgcgacttcgccgccatggatgcaatgaagagagggctctgctgtgtgctgctgctgtgtggagcagtcttcgtttcgcccagccaggaaatccatgcccgagccgacaagaaaaacgtgcggagcgctagttctcctggacatcctcttggccccagaagaatgaccagacggaccatgaccaccaccaaaatgatgatgatgcggcggaccaagcggcggagaagaaaaagacgccggatgaccatgatgaccagaagaaccctgctgaccaagaaaacctgtctgacccctagaaccagcgccgccacaaaagctctgcccagacagacaatcagccagcggaggcctatccagacacctcctggaacaagcctggccatctggggcagaagaagcaagatcgaggcctctcctatcggcagcatcacccctctgagcatcagcagacctaccagcagagccagacagagctgttgcctgcctggactgacacaccctgctcatcagcctctgggctctatggttggagctggaacaggcggaggacctgcttgtgtgcctgtggccgaagcttctacaggcgcttggacagctgaaggcgctgccggcacaagatgtagagccagcagagccccttgcagacagctgcctgcttctagccctaccaagtgcgagatctgcgtgaagagaagaaggcggcgcaagcggagcagccagtctagatctcccgtgcctaagaaacgcgagcggatgatgctccctgtgcgggccagaacagctagatctgctctgccacaaggcagggctcctctggaaggaatgcttctgcctagagcactgcccagcctgctgagcagaatgcctgccagaagagagagcagattctggctggccctgcaggcccttggactcagacctcctcatctgcctagctgtcaccctctgcctcaactgcttggacctcctccacctcatcaggcccctggcgagaaaaacgacctgcagctgttcgtgatgagcgacaccacctacaagatctactggaccgtgatcctgctgaacccctgcggcaacctgcacctgaaaaccaccagcctgaacgccaagaaaatggaagatatgatctgggagagcaaccagcagctgaagtggacccctcacatcctgaagtccgcctctatcgccaagaagcggatcaagctgcggcggaacagcaccagacgggaaatgccttctcaggccacaccttctccacctggaccttggagagccgctctgggcaaagaagtgaagcggagccagagcaagctgagactgagaaacacaagccccttcgacaaaaagggctttgtgatcctgagcaacatgggcggcaaccggtctatctgcctgaccatcgtgttctttctggccccttacttccccatgcctagcagctggtctagcagcggcagaaccagactgcctctgaggccacagagaggccctagacctctgcatagatggctgcagcagaccaccggctgctctcagagaagaggcgactgcccaagaaccatggccggaccatctgcttctctgcaccctgcatctggcagagcctccagaaagacctggcagagaaggctgagagcctgtagagcaggcggacctgctggatgggctagacaggccagaaaacgcaagagagagaagcggtcccagaagtccagacagaaccatctgcagctgaaaagctgcagacggaagatcagcaactggtctaagctgcggagcccctggatcttcgaggccaaaaagagcatgaagagatcccagcggcctcctcggagcatcctgagcctgttcaagaagaagaagcccctgacattcagccccagcgtgtccaagaagaggctgcctaagctgaagggcaagaaacgccggaaagaaatccagcggaaggtggtcaagaaccccagccagcctgtgccactgagaaatgacggcatcaccaacggcaacgacagcacccggtcttgcagcatcagcctgaagaaaagcctggaaaagatgcccctgatgcggagcctgctgtactccagaatgtgcctggtgcagatccccacacacacctgggagcccgactactttgtgtccctgcctatgatgttcagctgggccacacagagctttccagtgggcgccgtgtttctgaccagacctgccattccttgctgtagctgtaccagccactccaatccttggagccagtccacactggccatccggtttatctctgcccctcagccaagcagcagcaccgttacagctgctcctagcggccagtattttgccctgcggagtatgcccaagagccggaaccaggtgctgtttcggagaaatctgaccccaagccagctgcggacactggcccctccatatatgctgctgcctcagtctctgtcccagagcctgtctcggaagcagatcccatctcagtccatgctcgtgcggaccaggctgacactgacaggcactagaagctccggcaccagagcctctccatctgccgtgtgtctgtgctgctggacatgccccagcagaagctttcctgccgcctctccaagcggactgagagcacctgttggagcacaggctcctccagaagtgacactgagagccagctgtgccagctccgccagcaaagcttgtgcaggactttggccttggggagcccaagtgcggatgaagaagaaggacagcaccatcttcatctaccccaggctgaaaaccttcggcgtgccactgggcagcattctgtgtctggctggaagcctgagcacgatgatgatcattagcaccaccagacaagagtgcggcagacgggccagcgtgccctgtagacctatgatcggaagcgccagacctggaccatggcggacaagtgctatgccttctgccatgggagtcgccctgcctaccagctgtgaaagcggaagatctcctcctgccaccggcggaagaatgccaggatctcagtctatcatgatgagctggatgcctccactggctccctgcgctgcttgtccttgttctcctgctcctacactgtgccctgctcaccctgctagagcaccaacagccgtgcctgcctttacacccctgtctgctcatcctgtgccagtgctgtctggatgtcacctggctgtgcggacctccatgcttaccttgctgccaatgatgaccctgaaggccctggtcaagacatggacccagttcagaaactaccccagacggcaccctcacagaagcccaccaacaagctgtcctccactgctcgaggcctttccactgccaagagccagcctgagagctaccgtgcctagacactctagcgtgctggccacaggactgcatctgcataggcagattagcctgcctctgcggggcttcctgctgcatcaaccactgccaggacaacacctgtggctgtcccacagactgagactgcggctgcctagaacaaccgagatccagctgaccatgaacgactccaagcacaagctggaaagccccgctctgaaacaggtgtccccagctagtcctcctacacagcagcctcagacaccccaggattctagacaggtgctggccgtgcctatgagcctggcctgtagcatcaccgtgtccttcgtgggccagatctctaccctggtgctggacgtgtcctccatcagccactggaacggcatctgggaagtgatgcccagaacactggaaggctgcatctccgtgaaggaccaccggacatcccagaaccacagcaagtgcatcaccgagtgtgtgcggacagccctgaacaccaagtgtgaaatttgtgtgaagaacaccgccatcctggctatcaccctgatcaccccacaggaccctcacctggaccctgtgtgtcatccccatagaaggcccggctggaagggacaccacagagtggtgtttagccaccatccttccggcagcaccaagtctcactggcagcagagagaaagaggcggaggccgcagagaaaagaagggctgtagagaggcaagcagagccggccagtttcctgtgtggcggagaacatctagaggcatgtccctgcagtggaagtccggcaatgcctgcacacctctgagatgtcccagcagatctccagccaccttcctgactgccctgaacggctggcatagatctggactgagggcccagaccgccttctttctgctggacatcatcctgcggagagcccggcctacaagctgcagcacatgtagaatgtggtggcggctgccctgcaaagtgaccgaaagctccctggccaagaaaaccctgaccaatcagcctagcttgcccggaccttgtgctagcctgctgtctacactgagccagccaccacctcaggctcctagccaagtttggacagccgctacactgcggtgtcctgctgtgcctgctgctgcatgtccacctctgaagctggctccactgcaagtgaccacaacactgaagctgatcctggtcatgctggaaatcgtgaccgagaacaaagttcggcagaacttcaagcggaactccagcttcttctacaccagcgacagaggctacccctacgatgtccctgactatgcgtcctaaaggcgcgcctagcggccgc

SEQ ID NO: 1208 - DNA, 4672 bp, Artificial Sequence
  Cloning cassette hTPA 2D
gaattcggatcccgcgacttcgccgccatggatgcaatgaagagagggctctgctgtgtgctgctgctgtgtggagcagtcttcgtttcgcccagccaggaaatccatgcccgacggaagatgcagagcctgaatcaccccagcagactgaccaacaatcctcggagaaagacctggaagatgcggaagaagtacgcccagaagcctagccagaagaaccacctgtaccggcagatcaaccggcgcaagctgcagagaaagaagtccagaagccacctggacttcagcccctactggatgaagaaagtgaagcgggccagaaaccggaacatgaagaaaaccatgagccacctgatcgcccatcaggccctgaagatgtctggcctgagactgtttcaccccagactgctgaccagaaagaagcccggcaagcagaaaaagggccacatgatcttcagccggcggaagtggcagatccggcacgtgctgaagaatctgatccccagcctgaacgcccagtggatgttcctgagaatcgctagcccacagatcatgcagagaaccagcgccgaccggttccggatgaagcggagaatgcagaacctggacaatctgggcgtgccctggcctctgttgcctggattgctgctggcccatatgtacggcttcagcacctacggcacccagaaaggcgagtgcgtgtgtctgcagtgtctgagcggcagcagcctgttcatcctgaagcagcccctggacctgaagatctccaagaccttcatggccagccctcagattatgcagcggatgagcgccgtgaacttcgagacaatcctgcaggcccatcctcaggtgccagctcttgctcctcaagcttggtggcccgctagaagaggccctctgacatctgctccaagcgcacagcagtccctgacacggacactggaaagcgccggactgtttccttggctgcacacccagtgccgggccttcattcacacacctagaagccctggctgcagcgtgtacgccaacatgtgctggcggtacaagaaacggggagtgatcgcctggcggatctaccctcctagcacatgcagcctgccttgcagaggcctgatcctgattcagcacggcggcatcttcaccttccggttctgggtcgagaagctgagctggaacatctgcaagaacctgagcctgtacctggataagttcgtgcagcggctgctgtacgtgtacatcatcgagacaaacgtgttcgtgctgaacctgttccacgtgccagtgaaccagatcttcatgatggccttctacctgaagtacaccgagaaggcctgggtcatggaactggaatggctgatccagcagcagtgctaccagcggaagagaatgaagaccggcgccatccaagagaagggcgctattcaagagaaaggggccatgaccaagcggatctgcgtggtcaatttcgaggcctgcagagagatggaaagcctgagcgcccctgagaagatcaccctgtttgaagcccacatggcccggtgcaccagcatcaatgtgctgtgtgtcagggccagcctgatcgagaaactgatgaaagaaaagcgcaagatgaagcgcaaccaggtggcatcccctcaaatcatgcaacggctgttcatcaagggctaccagaacaaccacttcacgttccacctccaaaacttcgccttcttcagctccttcggcaacaacaagtatatcaacatcctgacctttctgcccagcagattcccttggggacctcctccactgggagcccttagagctacagctcctgctacagctgctccccaggcacagacacctcattggagagccgccaccacaagcagcatgagcagctctccaagagccgagcctaccagctctagctcttgggccacttgctggcctagatgctgcagctccagctgctattggagcctgtctagctggcctcctgctggcgctgccgaagccacaaataccagaaccagaagccgcgagagccagcggggaagaatgctgacttggagaagctccctgtggctgcagggcaccagatgttttacaggcgtgcggaccagctccaggtgcagcctgatggaacagatccctcacctgaagtctaacagccggaagaaactgctcgaggacatgaagcagaacggcttcaccagacggcggaacagcagaaagcagagccaagtgcagctggccatccaggtgctgctggtggacaagcacaagtactttctgttcggcagagccacatttctgctggctctgtgggagtgtagcctgcctcaggctagactgtgcctgatcgtgtctagaaccctgctgctcgtgcagtctagacacccaagctggccttggaccagatgcctgagaatgcggcctccacgcagccactggaactctgcctacctggggagaacactgctcgtgacctgcatcctgtaccacagatggatcgtgaccagcatgtgccagagccagagatggctgacctccaccacctctagaagctctgccctgatgtggacctggtggtgtacaagaggtggcggcaagcggaagaaaaagatgtgcaaggtgtccggcggctgcaccgcctgtgttgaaagatgtccttggaagggcatctgttggaagtggcctgtgacagtggccgccatgagcagaacacctccaagacgcgtgtgcggccacagagagggcagcgagtctgataatctgggcctgctgtactcctttccacctgtgctgttcaaggccgaccagagcgaaagctctctgagcagcggcaacagcgtgatcgtgcacaagatcgtgctggtgttcctgaagtccctgagcagctacaactgcgagagaagaatcagcggcatccagaagagagccatcgagttcgccgtcctgaagctgctgaacatggacctcggcaagggactgacacaccccgtgcctctgaagaggaccctgcagaacaagcggaacaagaacatcaagcgggtcaaccagaagaagggcaacatcaagaggaagtccatcctgctgcatctgattgtgctgaacagccccgagagcaaccgggaaaagatcatcaaccccaccatcagctgcccctttcagagccccacaaagagactgggaagccctcctctgcacctgtgtcagcctctgaggccctatcctatcagcgagggcctgaccatgaccaccggcagaaacatcaacagcaactccctgatgaccaactgcctgttcagccccatcttcctgtgccaccacgccatcatgcaccggaagatgacaagccctcacttcagactgttctccagcaagatcccacatccacaggtcccaagtgtggtggccctgtgcaagtttacacacccctgcaccatgctgctgccccaaggcgctttttggaagcctcctagccagggcatctccagctgtctgatgacaggctgttggcagtggtccagcgtgacaagcctggaatggacagcccaagagagaggctgttcctcctggctgatgaagcaaacatggatgaagtcttggtccctgcgggaccccagctacagatccatcctggaatacgtgtccacacgggtgctgtggatgcccacctctaccgtgcctaagttctttctgaccttcagccagatccggatgtgcgccctgtctcaccctagcttctacatcagctccaccgtgtgctttctgagcaagcactgcatgaccgcctgcacacctggaaccagcctgcagtgttacctgaacctggccaacggcctgtggttcaacctgatcttccggaacaaaaagaccaagctgtggttctccctgattaacatccaccaccgcaagaacccactgctgcccatgcggctggaaaaaaaggccacttggatgcggcggaccgagctgtctctggaaccttggattccttacctgcatcagcagaaaacccagtggctccccatgagaagcctgggcgagccttggcgagctggatttcagtggggagagtctccctggcaagtgatggcctctctgacaggcagacgcaagaaaagagaggatcactgcggactgcaagagaaaaaaagccggaagctgatgtccagctgcgccgctcctccacatagactgctgggacctagcagatggggaagctgtgggagagcctgttcttgtggcagaggctgtggaacccctagaggcgactggaagagacacccacctcggcggattctgtttcacgtgcggaacatcgtgtacggaatccaagtgatgctgtgctgtcaccccgcctggctgtctccaatcagcgcttgtcctcgcctgctgccttatccattccacgttctggccctggaagtgacattccctccaggcactgccatgcctcagatgcaattgcaggcactggcaatgtgggagaaaggctgggacaagcctctggaaaacacacagatccccaggacaagcccactgtggaagatcacaatggtgctgacataccccaactgcgtggtgcacgtcctgatgttcggcggcaagaagcggagcaagttcggctacccctacgatgtccctgactatgcgtcctaaaggcgcgcctagcggccgc

SEQ ID NO: 1209 - DNA, 4687 bp, Artificial Sequence
  Cloning cassette hTPA 3D
gaattcggatcccgcgacttcgccgccatggatgcaatgaagagagggctctgctgtgtgctgctgctgtgtggagcagtcttcgtttcgcccagccaggaaatccatgcccgacagaacaccagaagcaccaacctggaaaagaaccccagcctgaagaagcagagccagcggagaggaaagctgagcagcagaaagaagggccacaccaagaaccggcggaaggccaagagaaagccccagatcagccagaagaaggaccctgccggcaagctgaagaaacacctgaaccggaagctgcacctgaccagatcctgcctgatcgacctgaccatgatgatgagccagaagctgtggaagaaccagcgcaagagaatccctctgccttctccacggcagcatctgctgcctcagtatccactgcatcctccacctccatgcctgctgctgctccaccacagacaccatctggcctttctcgagatggcctgcagcagccagcacacccacagcatcaagatctggatcagcttcagccacgaggacctgcctagaatgctgcccatcagcagccctctgcacagaccccagatgcctttctggacctgcacctttcctgccaccacatggggcacatgggagacaccttctacatggggctggcggacattcggccctgtgtactacgtgtgcaaccggatgaacgtgtccagcgtgctgaagcctttcctgttcaccgtgcctatcgaggacatgagagagtgcaccctgggcagaaacagaatgaatgtgtcctctgtgctgaaaccctgtctgatccccgtgccaatcctgaccacactgagcttcgtgctgatcgaggaaagccggcggaacagacggtacagaaagatctacggggagctgaagatgtccctgcaggccctgcctctgacctttagcacactgctgtgggacagcagacacaccaccaccacaagcagccccagaagatcccctgctctgagagctagaggcggcaccacaatcggcgaagtgacaagcagaggcgccagcagctctaccagcagagacagcagaagctttttcaccagcgctcaccccagcagaccctgcagaatgagactgtaccagagcaacggcatggaagcctgcggcacacaccctacacctagactgtctagaggccctccactgcacaccagaaccatgagcctgagcaacatcctgatgaagttccggctgatgctgcagaagcagtgctgctacaacctcgtgatcaagcaccctctgatcttccggatcaacctgcggagacagggcaagaccaaagacggcgttgtgcagagcctgggcttcctgaaccagcagatcatcctgcagaaagagttcttcatctgcctgctgatgttcatcaagcggtggaagccagccgccacaaagacacctccaccactgattctgtggcctcaggccgctcctgtgcacaagaagagaggcctgttcagcctgttcttctcccactgcctgtgccaccagatgaagtgcctgaccgccgtggattgtctgcaggccttctgggacatgatgattcgcaagatccagaagcggcggagaaccgccaaccggctgaaaaagaaatacctggtgcagtgtaccaacctgagcgtgcccatgatgctgaccatcctgatctggaagcgggtgttcatcctcctgctgagcgacaagaagtgtctgagagtcagatgcggcggatggctgtgtggctggacacctagaggcaagaacaagaagcggagaaagctgcggcccaagcacctgaagaaaaccagcgccaaggtgtccgtgatcaccatgaagctctgggagaagcacttcaagggcctgaactggaacctggtcgtgtggattctgaacctgaagatgatgtggctcaagaagtccaccaagagcagacagagcagcccattcctggctcggagctggaataccatgcaatggaacaacaagaaaatggccatgaccgtgatcgctggcgcccaccactgtcagtacaagctgacctacaccaaagtgtggaagatgaattggaagaaaatgatgatcggctcccagcacctcctgtttagcccactggattcaagcccactgcagttgctgctgcaccctcacggcaagagatgcaacccttgctgcagactgacctggatgagcagagagtgggaaaagcggaagcagatcctcggcggaggcggcaagtacaaagagtacttcctgaagcggattctcatccggaaggctatgacagtgctggccggcgataagaaaggcctgggaagattcatgagatgcgtgcagagcgagacaaaggccgtgtctctgcagctgcctctcggccgaagaaagtccggcgtgatgaagtgttgggatctgtgccccagactggactttcaccccagatctagctctggcggcgagaagctgaagcactgtttcaaagcctggggcctgtgcttcttctacctgctgtacttcgagaagaaacggcccgagtggctgagcgttgaccctcctggatctgtctggattctgccctgcatggacctggacggaatgctgacagtgatcggccagggactcgtgggcatgacccctagagatctgggaacagtggctggcgccaccgcacagattcagaggcctatccaggtgcagacaggcggcagactgttcctgattcacctgagaaaggtggacacccaccatctgcaggtcgtgaccaagaccgtgacagccacaacagctgacggccagaggatgcggagactgaagtgcaaggcctgtcggctgagatgggccagacctgaacctgctgcacaggctcctccaaagagccactttccacctcatcctagcggcccctccagaacctctagcctgcagctcagacccattcctccacacctgagacacccactgctgctgaagggaaagaacagcccctgctgccaaaagaaactgcgggtgcagaaccagggccatctgctgatgatcctgctgcataacgccagacagcccagcaggcctaccggaagaacccctaccacaagactgatggcccctgtgggcagcgtgatgtcttgtagcctgctgacccagccatctcctgccagcgcatgtacaatgccaccactcctgcatccacagtgggccccacatagtgctggactgtctccaggcgcttgcagacctgcctgtacctgcatcagcatgaccaccatctccagagccacatggcggctgagaatcccaagcctgaggaagtaccggcagaacatcgagatcacccctcagcggtctaaggcccaggtttccgtgtacagcggcaatctgctgagcttctccagacggggcatgaagagtagcgtgcggctgaagaacagcatccctcacgtgccaaaagccaccgccgctcactctgtgacagtgaagctgcagtacctgtttttcctgaccgtgtgcggcttcgaccgggtgttcctggttaagatctgcaagaagaagctgctcctcaagctgctgagaggccccagacggaaagtgctgatggtgctttggctgcccgccaaccagagtctgcagaaaagccaggtgttccagtgggtgctgcggaccgaaacctacatggaaatgcactacggccatcaggcccctcaggtggccatgctgcctaaactgctgtgtagacagatgctccccactctgtccacactccagcagaggcatcctcagggaccttgtcctcctcctgtgacacctctgagagtgcagtctgtgctgctcctgggagtgcctcagacagccgcttttagcggccggattctgcaccagccagaaatggccgccatgagactgatgcccaagttcctgaactccaccaacagctggtggacagtggcccctagatgtcctagaagcgccgtggacattagccccggacctacatctcctagcctggcctcttgtgcctctgtggccattggaaaactggcactgctgggcgcatctgccccttgtggcgcagctggtgctagagaggctggaagatttgccgtgctgggcaccatggttatgaagggtgctgccgcagcctcctgtcagtctcctccatctccaagagagacaacccctagcagcgacgccaccagacggacaagacctattgccgctcagagcaaaaagaccatgactgccgccggactgacccctcggagaaacctgcagagaaatctgaaggtcctgggcgccaagaagatcaccttcctgagaaacagcagacgcgccacacctacctctaagggcagcctgagaagaaagtacctgagagtgaacatccgcaagctcatctggaccaagcagcggagcttcctgtctctgttccccaagctgagagccaccgagcagatgaccaatgtgggatgcctgctcaagaaaagcagccaattgcggcggagctggcgcaatgtgtcccggatcagcaacatggaacacaggctgaccatggacagcgccctgagcctgacaaagagagagggccctgagacaagcgagaagaagaggaagttgcctggctacccctacgatgtccctgactatgcgtcctaaaggcgcgcctagcggccgc

SEQ ID NO: 1210 - DNA, 4690 bp, Artificial Sequence
  Cloning cassette hTPA 4D
gaattcggatcccgcgacttcgccgccatggatgcaatgaagagagggctctgctgtgtgctgctgctgtgtggagcagtcttcgtttcgcccagccaggaaatccatgcccgaaacagaaagaccagaaaggccgccagagagaagcaccgcaagaccgacgacaagaagaagaagtccaccgaaaagaccaagaacgccaagaagatgcccttccagcagcggcctcctctgcagcctgttaacctggatctgcagcaccagcgcagacgcaaaaagaagaaagacaaggtcgaaatccggaatcggagccctaaggccaatagcaccgagtgtcagggcgagcacagcagagagcagaacctgctgaatctggtgcagctgaaccctcacagccctcaccacagaaaggacgaagaggaccaccagaagcggcaccaccaccacaatcaaaagaaaatgagcgtgcgggctagcgtgtccttctggacacttttgccaacaaccggcgtgcggacaagaggctctccactgagactgacactgtggcctccacgggttccaccttctccacctcttgctctgggccccagaatgcagctgtgtacccagctcgcccggttcttccctatcacacctcctgtgtggcacatcctgggacctcagagacacacacctcaggctcctctgaggctgtggtcttggtgcggcacaagccagacctacttcggcagcagaccatctccttgcctgagctggtccagcagaattgtggcccctggacacgccctgagctgtcggactagaagaagatggtctagcaagcggtggatcttctccaaccagctgaccgtgcagatgctgtgcctgccaatcacacacccattcgcctctcagcctctgggacaagagatgcccaacaacacccagatccggctgctgaagccctgcagagtgaacgccgtggaagaactgcacagcaggcggatgtctgtgcggatcgtgaagaactgggtgtcctgctgttacgtgcggctgtctgctgtgggcctgtctacttggagtgccctggacgaggaaaagaagaacggccggatcagcagcctgaaaaagaaagtgaatgcctgcagctccctgatcctgagcttccagcgcgtgaaaaccggcatggaaatcctgctgtggattctgctgaagatggaaattcagatcttcaagatttgcctgggcgagatgcagctctgcggccaggcctttggaagctttagcgccgatttcagcgcccctcagatcattaagaagatgaagaaacggatcatggtgcacgagctgaagaagaatctgctgctgcctatgtgctccagcctggctctgccaacaggcctgacatctctgatcctgcctagcagcgatctggccgtgctgatctctagctccaccagccactttctgatgcggagccctgtgctgccaagcagcagactgacttgtgcctctccacagctgccccggatgtggacttggtctagctggctgaagaacgagggcaacaaccactggcctagagtggaaatgcctaccggctggctgctcgtcggctacaacaccagaaacacagcccagaatcctcggctgcagcagcacctgaaacactggcagcagtgcaccagagccagatggtgtcaagagccctgtcagaccctgaccttcttccatttcttcttctttttcaaaacggtgtccctgtgttgccccggctggtctaaaggacaacctcctccacctggcctgaagccttctagcctggcttctcaggtggccagaaccacaggcgtgtaccagcacgtgtggctgatctgtttcgtgtttttcgtgtgtgtggaaaccggcttctgtcacgtggcccaagtgggactcgagagactggtgtctctgtccggcatcaccgacgtgaaccattgggcccagcctaagccatctcctagcaaaggcaccggcatgaacagacccatcggcctgagagttggcaaaggcgtgtgggccagactgatcctggccatgacactgaccctgaacggcatggccaagaagtcccagcagcctctgcaggtcgtgctgagactgggaaacctgcctccattcttcagaggcagcgaggtgccctttcctagaccttgtcggaccaagcctgcctgcacaagcaaggcctggactcccagaaaactcgtggggagagccgtgcggagaaagggatctccactctgggattgctccaccacaacaggcacacaccacggatgcctgtgggagatcccatctgtgaccctgctggcccatcctagaaccgcctctatcaccctgcctaccacaagcctgaagggctccagaaccagctgctgccctagatctcaccccagactgcctaggaccaaatggcccctgcagtgtctgctgcacagcctgggaacaaccggaacactcgtttgggaaaggggcgtcctgcagatgagatccctcgaagcccattgtccactgcagaccttccatctgcaccactgcaggacccagcctagctcttgtcctcctgcctggattctgtaccaaggacagtggagcggagccgtcgtgggacttagacctgtggctcaccatctgcctagacctatccagggcctgcactgtccacaggcacctcatcaacctgctctgagctggggaaaatggcccgtgggaatgacaggccctgccagatgttgcagatggcccagacggtgccagaagaaggttccatcagcctctccatggggcctcgtgctcaaaaagaaccggaaacagatgctgaaccagaagtgtctggccccttttagagagagcaccctgggcaatttctggatgaagctgctccagctgcctgtcgtgatcaacctgaagagactgcagaagttcaacctgcacctgtgctactaccacagccagagcaacagaaacaagagccgccagatggaatccctgggcatgaagttgcagtcccagaaatcccagcaccactgtgccctgcggaagatcgagtgggccacaaagttgtctctcggcggaaaagccggaccacaggctcaagagaaggccacctctcggattctgaacctgcaagtgctcaagaagatcctgcggagctttatgaagctgtaccactctctggtcatgtgcctgcggctgaggaccaagctggaaaaggctctgagcgccctgttcatctggccccagcacagctacaagcccctgttctttcacggcgacctgtgcgagtggggaggccaggctcatagacagcggaactggctgaaaaactggaagcggttcaagcttaaaaagaagtacatccagaagaagaagcagaagtctaacaagatcatctgcaagggccaccgcatcaccatcatctgtatcaagaatatgttcctgcagcgcaagggcttcctgaacctgagccacgtggaaaagttctgtagaggcggccctagcgccagcgatagatgctgttcttgtagccccagcggcttcagtgccggcagaggaagatgtcctgttcagggctgtctgaggccccacagagttcaactgctgagaagatggggccctggctctcctgctggacagaggctgtctaagggctttcagctgctccgttggtggggaccaggatctcctgctcctgagcctagaaagggcccatttccaccacctgatcctccatggcctgtgaccgctgtgacagtgatggctggatctgtgcctagtgctcagtctgtggacgccctggaatctcctggacctctggctctcgaaggacctagcagccctagaaacctgctttggagagagatgagcatctttctgcccggcatcttcaccgccaagaaaagccccaccagcttttgctgcaatatcctgaacagcctgccaagctctatggaaatcgccgtgctgcaagaggacagcaaaaagatgacccagaagggccaagccttcggctccctgtgtcagcttgtgtccgctgacttctctgcccctcaagtgacccggctgcggagcctgaatcatctgctgatcacctacacaccccacatctgcagacacaccctgctgacccctgacaccagatggatctttagcaatcagctgcagacagtccagatgctctgtctgcctccactgaagcagggcgagagaatcatttggcccctcggcggctttcagatccccaacttcttttggagcctcggcatcggacacactggcgcctggtggcatactggaaggcggagaagagaatggggcggcagcaccgtgtctagaagccctctgtggatcagctccatgatctacctgagaggcatggccttcgccagcgacagcagcatcagaaccaccagagtgtcctggtgcagaagatgcggcgccaaaagcgctgccgccagctctattgaagctctgaccgctctgtttacctgccggaccgccagcatcagcgtgaacatcagcaccctgatgtccatcctggaagcacttaagaagaaacccagagacatctgccgcatcagctgccggtgtagacgcgagtacagagtgactatgggctacccctacgatgtccctgactatgcgtcctaaaggcgcgcctagcggccgc

SEQ ID NO: 1211 - DNA, 5299 bp, Artificial Sequence
  Cloning cassette hINV 1C
gaattcggatcccgcgacttcgccgccatgcatcgacggcgctcacggagttgccgggaagaccaaaagcctgtgatggacgatcagcgggaccttatttctaacaatgaacaacttccgatgcttggtaggcggcctggagcaccagagtccaagtgttctaggggcgccctgtacactggtttctccatcctcgtgacactgttgctggcgggacaggcaacaactgcgtatttcttgtatcagcagcaaggaagactggataagcttacagttacatcccagaatctccaacttgaaaacctcagaatgaagcttccgaagcccccaaagcccgtctccaaaatgaggatggcgacaccgctccttatgcaagcccttcccatgggggctctgccccaagggccaatgcagaacgctacaaagtatggaaatatgacagaggatcatgtcatgcatttgcttcaaaacgctgatccccttaaagtttaccctcctctgaaggggagctttccagaaaatcttcgacatctcaagaacacgatggaaacgattgactggaaggtgtttgagagctggatgcaccattggctcctgttcgagatgtcccggcattctctggagcaaaagccgacggacgcacctcccaaggaaagcctggaattggaggacccgagtagtgggctgggcgtcacaaagcaagacctgggacccgtgccgatgagcaccagacgggaaatgccttctcaggccacaccttctccacctggaccttggagagccgctctgggcaaagaagtgaagcggagccagagcaagctgcggctgagaaacacaagccccaccgagatccaattgaccatgaacgacagcaagcacaagctggaaagccccgctctgaaacaggtgtcccctgcctctccacctacacagcagcctcagacaccccaggatagcagacaggtgctggccgcttcttctcctggacatcctcttggccctggcgactgccctagaacaatggctggaccttctgcctctctgcacccagcatctggcagagccagcagaaagacctggcagagaaggctgagagcctgtagagctggtggacctgctggatgggctagacaggccatgacactgaaggccctggtcaagacctggacacagttcagaaactaccccagagtcggagccggaacaggcggaggacctgcttgtgttcctgtggccgaagcttctactggcgcctggacagctgaaggcgctgccggaacaagatgcagagcttctagagccccttgcagacagctgcctgccagctctcctaccaagtgcgagatctgcgtgaagagaaggcggcggagaaagcggagcagccagtctagatctcccgtgcctaagaaacgcgagcggatgatgctgcctgtgcgggccagaacagctagatctgctctgccacaaggcagagcccctctggaaggaatgcttctgcctagagcactgcccagcctgctgagcagaatgccagccagaagagagagccggttttggctggcactgcaggctctgggactcagacctcctcatctgcctagctgtcaccctctgcctcaactgcttggacctcctccacctcatcaggcccctttcgacaagaaaggcttcgtgatcctgagcaagggcaagaagcgccggaaagaaatccggcggatgaccagacggaccatgaccaccaccaaaatgatgatgatgcggcggaccaagcggcggaggcgaaaacgtagaagaatgaccatgatgacccgcagaaccctgctgaccaagaaaacctgtctgacccctagaaccagcgccgccacaaaagctctgcccagacagacaatcagccagcggaggcctatccagacacctcctggaacaagcctggccatctggggcagactgcctctcagaccacagagaggacctcggcctctgcatagatggctgcagcagacaacaggctgctcccagagaagaatcgccaagaagcggatcaagctgaggcggaacacactggccatccggtttatctctgcccctcagcctagcagcagcaccgttacagctgctcctagcggccagtacttcagcagcttcttctacaccagcgaccggaccaagtgtgaaatctgtgtcaagaacaccgccatcctggctatcaccctgatcacccctcaggaccctcacctggaccctgtgtgtcacccacatagaaggcctggctggaagggccaccacagagtggtgtttagccaccatccaagcggctccaccaagagccattggcagcagagagaaagaggcggaggccgcagagaaaaaaagggctgcagagagatgcccagcagctggtctagctctggcagaaccgccgacaaaaagaacgtgcggagcagaaccagactgaccctgacaggcacaagaagcagcggcacaagagcctctccaagcgccgtgtgtctgtgctgttggacatgcccctccagaagcttccctgccgcatctccatctggactgagagcacctgttggagcccaggctcctcctgaagtgacactgagagccagctgtgcctctagcgcctctaaagcctgtgctggactttggccttggggagcccaagtgcggaacaaagtgcggcagaacttcaagcggaacctggccaaaaagaccctgactaacgccctgcggagtatgcccaagagcagaaaccaggtgctgttcagacggaatctgaccccaagccagctgagaactctggcccctccttacatgctgctgccccagtctctgtctcagagcctgtccagaaagcagatccccagccaatcaatgctcgtgaccgccttcttcctgctcgacatcatcctgagaagcctgctgtactcccggatgtgcctggtgcagatccctacacacacctgggagcccgactacttcgtgtccctgcctatgatgttcagctgggccactcagagctttccagtgggagccgtgttcctgaccagacctgccattccttgctgcagctgtaccagccacagcaacccttggagccagtccttcaagaagaagaagcccctgacattcagccccagcgtgccaatgtctctggcctgtagcatcaccgtgtccttcgtgggccagatcagcacactggtgctggacgtgtcctccatctctcactggcgcaagcgcaagagagagaagcggtcccagaagtcccggcagaaccatctgcagctgaagtcctgcagacggaagatcagcaactggtccaagctgagatccccgtggatcttctaccctcggctgaaaaccttcggcgtgccactgggctctatcctgtgtctggcaggctccctgagcacgatgatgatcattagcaccaccagacaagagtgtggcagacgggcctccgtgccttgtagacctatgatcggcagcgctagacccggaccttggcggacatctgctatgccatctgccatgggagtcgccctgcctaccagctgtgaaagcggaagatctcctcctgccaccggcggaagaatgcctggatctcagtctatcatgatgagctggatgcctccactggctccctgtgccgcttgtccttgttctcctgctcctacactgtgccctgctcatcctgcaagagcccctacagccgtgcctgcctttacacctctgtctgctcaccctgtgccagtgctgtctggatgtcacctggccgtgcgcacctctatgctgacactgctgcccatgagacaccctcacagaagcccacctacaagctgccctccactgctggaagctttcccactgccaagggccagcctgagagctaccgtgcctagacacagctctgtgctggccactggactgcatctgcatcggcagattagcctgcctctgaggggcttcctgctgcatcaacctctgcctggacaacacctgtggctgtcccacagactgaggctgagactgccaagaacaggcgagaagaacgacctccagctgttcgtgatgagcgacaccacatacaagatctactggacagtgatcctgctgaacccctgcggcaacctgcacctgaaaaccacatctctgcggagagccagacctacctcctgcagcacatgcagaatgtggtggctgaagctggccccactgcaagtgaccacaacactgaagctgatcctggtcatgctggaaatcgtgaccgaagaggccaagaaatccatgaagagatcccggcggagcaagatcgaggcctctcctatcggctccatcatgaagaagaaagacagcaccatcttcatcaaccagcagctcaagtggacccctcacatcctgaagtctgccagcgtgtccaagaagagactgcccaagctgaacggcatctgggaagtgatgccccggacactggaaggctgcatcagcgtgaaggaccaccggacaagccagaaccacagcaagtgcatcaccgagtgtgtgcggacagccctgaaccagagaaaggtggtcaagaaccccagccagccagtgccactgagaaacgacggcatcaccaacggcaacgactccaccagatcctgctccatcagcctgaagaaaagcctggaaaagatgcccctgatgaacgccaagaaaatggaagatatgatctgggagagcaacatgggcggcaaccggtccatctgcctgacaagactgccctgcaaagtgaccgagtccagccaaagaccacctcggagcattctgtccctggcctctagagccggacagtttcccgtttggcggagaaccagcagaggcatgtccctgcagtggaagtccggcaatgcctgcacacctctgaggtgccctagcagaagccctgccacatttctgaccgcactgaacggctggcacagatctggacttagggctcagcaacctagcctgccaggaccttgtgctagcctgctgtctacactgagccagcctccaccacaggctccaagccaagtttggacagccgccacactgagatgtcccgctgttcctgcagctgcttgccctcctatcgtgttctttctggccccatacttccccacaccactgagcatcagcagacccacctctcgggccagacagtcttgttgtctccccggactgacacaccctgctcaccagcctcttggctctatgggctacccctacgatgtccctgactatgcgtcctaaaggcgcgcctagcggccgc

SEQ ID NO: 1212 - DNA, 5281 bp, Artificial Sequence
  Cloning cassette hINV 2C
gaattcggatcccgcgacttcgccgccatgcatcgacggcgctcacggagttgccgggaagaccaaaagcctgtgatggacgatcagcgggaccttatttctaacaatgaacaacttccgatgcttggtaggcggcctggagcaccagagtccaagtgttctaggggcgccctgtacactggtttctccatcctcgtgacactgttgctggcgggacaggcaacaactgcgtatttcttgtatcagcagcaaggaagactggataagcttacagttacatcccagaatctccaacttgaaaacctcagaatgaagcttccgaagcccccaaagcccgtctccaaaatgaggatggcgacaccgctccttatgcaagcccttcccatgggggctctgccccaagggccaatgcagaacgctacaaagtatggaaatatgacagaggatcatgtcatgcatttgcttcaaaacgctgatccccttaaagtttaccctcctctgaaggggagctttccagaaaatcttcgacatctcaagaacacgatggaaacgattgactggaaggtgtttgagagctggatgcaccattggctcctgttcgagatgtcccggcattctctggagcaaaagccgacggacgcacctcccaaggaaagcctggaattggaggacccgagtagtgggctgggcgtcacaaagcaagacctgggacccgtgccgatgcggcagatcaacagacggaagctgcagagaaagaagcgccggaagaagagagaggaccactgcggactgcgggccagaaaccggaacatgaagaaaaccatgagccacctgatcgcccatcaggccctgaagatgtctggcctgagactgtttcaccccagactgctgacacggaagaagcctggcaagaaccctcggagaaagacctggaagatgcggaagaagtacgcccagaagcctagccagaagaaccacctgtacggcaagggcctgacacaccctgtgcctctgaagagaaccctgcagaacaagcggaacaagaacatcaagcgcgtgaaccagaagaagggcaacatcaagagaaagagcatcctgctgcacctcatcgtgctgaacagccccgagagcaacctgcaggctcatcctcaagttccagcactggctcctcaggcttggtggcctgctagaagaggccctctgacaagcgctccatctgctcagcagagcctgaccttcctgcctagcagatttccttggggccctcctccactgcactggaactctgcctacctgggcagaacactgctcgtgacctgcatcctgtaccacagatggatcgtgaccagcatgtgccagagccagagatggctgaccagcaccacctctagaagcagcgccctgatgtggacccagtggtctagcgtgacaagcctggaatggacagcccaagagaggggctgtagcagctggctgatgaagcagacctggatgaagtcttggagcctgcgggaccccagctacagatccatcctggaatacgtgtccaccagagtgctgtggatgcccacatctacagtgggagccctgagagccacagctcctgcaacagctgctccacaggctcagacccctcattggagagccgccacaacaagcagcatgagcagcagccctagagccgagcctacaagctctagctcttgggccacctgttggcccagatgttgcagctccagctgttactggtccctgtcctcttggcctcctgctggtgctgccgaggccacaaataccaggaccagaagcagagagtcccagcggggcagaatgctgacttggagaagcagcctgtggctgcagggcaccagatgttttacaggcgtgcggacctccagcagacacccttcttggccttggaccagatgcctgagaatgcggcctcctagaagcaacagccggaaaaagctgctcgaggacatgaagcaaaatggcttcacccggtacaagaaacggggcgtgatagcctggcggagagccactttcctgctggccctttgggagtgcagtctgccccaagctagactgtgcctgatcgtgtctaggaccctgctgctggtccagagcagatgcagcctgatggaacagatccctcacctgaagtcctggtggtgtacaagaggcggcggaaagcggaagaaaaagatgtgcaaggtgtccggcggctgcaccgcctgtgttgaaagatgtccttggaagggcatctgctggaagtggcctgtgacagtggccgctctgatcctgattcagcacggcggcatcttcaccttccggttctgggtcgagaagctgtcctggaacatctgcaagaatctgtccctgtacctggacaagttcgtgcagcggctgctgtacgtgtacatcatcgagacaaacgtgttcgtcctgaacctgttccacgtgccagtgaatcagatcttcatgatggccttctacctgaagtacaccgagaaggcctgggtcatggaactggaatggctcattcagcagcagtgctaccagttgctgctggctcatatgtacggcttcagcacctacggcacccagaaaggcgagtgcgtgtgtctgcagtgtctgagcggcagctccctgttcatcctgaagcagccactggacctgaagatcagcaagaccttcatgagcagatcccacctggatttcagcccctattggatgaagaaagtgaaggcctctccacagatcatgcagcggatgagcgccgtgaacttcgagacaatcaggcggaagtggcagatccggcacgtgctgaagaacctgcctctggaaaacacacagatccccaggacaagccctctgtggaagatcacaatggtgctgacataccccaactgcgtggtgcatgtgctgatgttcgtgctgttcaaggccgaccagagcgagtctagcctgagcagcggaatctaccctcctagcacctgtagcctgccttgccggggcattagaatgtgcgccctgtctcaccctagcttctacatcagcagcaccgtgtgctttctgagcaagcactgcatgaccgcctgcaccagagagaagatcatcaaccccaccatcagctgcccctttcagagccccacaaagagactgggccacagagagggcagcgagagcgataatctgggcctgctgtactcctttcctccttggctgcccatgagatccctgggcgaaccttggagagctggctttcagtggggagagtccccttggcaagtgatggctagcctgaccggcaacagcgtgatcgtgcacaagatcgtgctggtgtttctgaagtctctgagcagctacaactgcgagcggcggatctctggcatccagaagagagccatcgagttcgccgtcctgaagctgctgaacatggacctggctagccctcagattatgcagagaaccagcgccgaccggttccggatgaagcggagaatgcagaacctggataacctgggcgtgccctggccattgcttccaggtgctgctcctccacatagactgctgggcccctctagatggattctgtttcatgtgcggaacatcgtgtacggcatccaagtgatgctgtgccggcggagaaacagcagaaagcagagtcaggtgcagctggccattcaggtcctgctcgtggacaagcacaagtactttctgttcggcccctatcctatcagcgagggactgaccatgaccaccggccggaacatcaacagcaactccctgatgaccaactgcctgttcagccccatcttcctgtgccaccacgccatcatgcaccggaagatgacaagcccacacttcagactgttctccagcaagatcccacatcctcaggtgccaagtgtggtggccctgtgcaagttcctggccaatggcctgtggttcaacctgatctttcagaaaaagggccacatgatctttagccccaagttcttcctgacctttagccagcggaccctggaatccgccggactgtttccatggctgcacacccagtgccggaacaaaaagaccaagctgtggttttccctgatcaacatccaccaccgcaagaatcctctgctgcctatgagaatgagcagaacacctcctcggagagtgtgcggatctccacctctgcatctgtgccaacctctgagaggcggcaagaagagaagcaagttcgccttctggaagcctcctagccagggcatcagctcttgtctgatgacaggctgttggggctcctgtggcagagcttgttcttgcggaagaggctgcggtacacccagaggcgactggaaaagacacccacctcgcagagagctgagcctggaaccatggattccttatctgcaccagcaaaagacccagcggaagcggatgaagaccggcgccattcaagagaagggcgctatccaagaaaaaggcgcaatgaccaagcggatctgcgtggtcaatttcgaggcctgcagagagatggaaagcctgagcgcccctgagaagattaccctgttcgaagcccacatggcccggtgcacctccatcaatgtgctgtgtgtccgggccagcctgattgagaagctgatgaaagaaaagcgcaagatgaagcgcaaccaggtggcatcccctcaaatcatgcaacggctgttcatcaagggctaccagaacaaccacttcacgttccacctccaaaactttgccttcttcagctccttcggcaacaacaagtatatcaacattctcacccgggccttcatccacacacctagaagccctggctgttccgtgtacgccaatatgtgctggcggaagatgcagtccctgaatcaccccagcagactgaccaactgtcaccccgcttggctgagccccattagtgcttgtcctaggctgctgccctatccttttcacgtgctggcactggaagtgacctttccacctggcacagccatgcctcagatgcaattgcaggcactggctatgtgggagaaaggctgggacaagcaagagaagaaatcccgcaagctgatgtcctcctgcctggaaaaaaaggctacctggatgcggagaacccctggcacaagcctgcagtgttacctgaacacacacccctgcaccatgctgctgcctcagggaatcccatctctgaacgcccagtggatgttcctgcggatcggctacccctacgatgtccctgactatgcgtcctaaaggcgcgcctagcggccgc

SEQ ID NO: 1213 - DNA, 5296 bp, Artificial Sequence
  Cloning cassette hINV 3C
gaattcggatcccgcgacttcgccgccatgcatcgacggcgctcacggagttgccgggaagaccaaaagcctgtgatggacgatcagcgggaccttatttctaacaatgaacaacttccgatgcttggtaggcggcctggagcaccagagtccaagtgttctaggggcgccctgtacactggtttctccatcctcgtgacactgttgctggcgggacaggcaacaactgcgtatttcttgtatcagcagcaaggaagactggataagcttacagttacatcccagaatctccaacttgaaaacctcagaatgaagcttccgaagcccccaaagcccgtctccaaaatgaggatggcgacaccgctccttatgcaagcccttcccatgggggctctgccccaagggccaatgcagaacgctacaaagtatggaaatatgacagaggatcatgtcatgcatttgcttcaaaacgctgatccccttaaagtttaccctcctctgaaggggagctttccagaaaatcttcgacatctcaagaacacgatggaaacgattgactggaaggtgtttgagagctggatgcaccattggctcctgttcgagatgtcccggcattctctggagcaaaagccgacggacgcacctcccaaggaaagcctggaattggaggacccgagtagtgggctgggcgtcacaaagcaagacctgggacccgtgccgatgcctattcctccacacctgagacaccctctgctgctgaagaacaagaagcggagaaagctgcggcccaagagcagaaagaagggccacaccaagaaccggcggaaggccaagagaaagccccagatcagaaacagccgcagagccacacctaccagcaagggcagcctgagaagaaagtacctgagagtgggagccgccgctgctagctgtcaatctcctccatctcctagagagacaacccctagcagcgacgccaccagaagaaccagacctatcgccgctcagagcaagaaaaccatgacagccgccggactgacccctagccagaagaaagatcctgccggcaagctgaagaaacaggtgtccgtgtacagcggcaacctgctgagcttctctcggagaggcatgaagtctagcgtgcgcctgaagaactgcaccaacctgagcgtgcccatgatgctgaccatcctgatctggaagcgggtgttcatcctgctgctgtccgacaagaaatctatccctcacgtgcccaaggccaccgccgctcattctgtgacagtgaagctgcagagccggcggaacagacggtacagaaagatctatggcgagctgaagatgtccctgcaggccagcaatggcatggaagcctgtggcacacaccccacacctagactgtccgtgtccgtgatcaccatgaagctgtgggagaagcacttcaagggcctgaactggaacctggtcgtgtggattctgaacctgaagatgatgctcaagaagaagtatctggtccagcgcgagtgggagaaacggaagcagattcttggcggcggaggcaagtacaaagagtacttcctgaagagaatcctcatccgcaaggccatgacagtgctggccggcgataagaaaggcctgggcagattcatgagatgcgtgcagagcgagacaaaggccgtcagtctgcagctgcctctgggcagaatggacctggatggaatgctgaccgtgatcggccagggactcgtgggcatgacacctagagatctgggaacagtggctggcgccaccgcacagattcagaggcctattcaggtgcagacaggcggcagactgagaggccctagaagaaaggtgctgatggtgctgtggctgcccgccaatcagagcctgcagaaaagccaggtgttccagtgggtgctgagaaccgagctgcccctgacctttagcaccctgctgtgggacagcagacacgacctgcctagaatgctgcccatcagcagccctctgcacagaccccagatgcctttctggacctgcacctttcctgccaccacatggggcacatgggagacaccttctacatggggctggcggacctttgccagacagccttctagacccaccggcagaacccctaccaccagactgatggctccagtgggcagcgtgatgagctgtagcctgctgacacagccatctccagccagcgcctgtacaatgcctccactgctgcatcctcagtgggcccctcattctgctggactttctccaggcgcttgcagacctgcctgtacctgcatcagcatgaccacaatcagcagggccacctggcgcagaaacctgcagagaaacctgaaagtgctgcggctgagaatccccagcctgcggaagtacagacagcagaacacccggtccaccaacctcgagaagaacccatctctgaagaagcagagccagaggcggggcaagctgtctctgaccacactgagcttcgtgctgatcgaggaactgctgaaaaagagcagccagctgcggagaagctggcggaacgtgtccagaatcagcaacatccggaagctgatttggaccaagcagcggagcttcctgtctctgttccccaagctgagagccaccgagcagatgaccaatgtgggctgtagactggattttcaccccagaagcagctccggcgacagagtgttcctggtcaagatccagagcagcccattcctggccagatcctggaataccatgcagtggaacaacaagaaaatggccatgactgtgatcgctggcgcccaccactgtcagtacaagctgacctacaccaaagtgtggaagatgaattggaagaaaatgatgatcggcagccagcacctcctgttctccccactggatagctctccactccagctgctgctgcacccacacggcaagagatgcaacccctgttgtcggctgacatggatgagccacctgaatcggaagctgcacctcaccaggtcctgcctgatcgacctgaccatgatgatgagccagaaactgtggaagaatcagcggaagcgcatccctctgccttctccaagacagcatctgctgcctcagtatcctctgcaccctcctccaccttgtctgctgcttctccaccatagacaccacctggcattcctcgagatggcctgtagctctcagcacacccacagcatcaagatctggatcagcttcagccacgagacaatgagcctgtccaacatcctgatgaagttccggctgaccaccaccacaagcagccccagaagaagccctgctctgcgagctagaggcggcacaacaatcggcgaagtgaccagcagcctgttctttagccactgcctgtgcgtggcccctagatgtcctagatctgccgtggacatcagccccggacctacatctccttctctggcctcttgtgcctctgtggccattggaaagctggcactgcttggcgcctctgctccttgtggtgctgctggcgctagagaggccggaagatttgctgtgctgggcaccatggtcatgaagaacatggaacacagactgaccatggacagcgccctgagcctgacaaagagagagggccctgaaacaggccccgtgtactacgtgtgcaaccggatgaatgtgtccagcgtgctgaagcctttcctgttcaccgtgcctatcgaggacatgagagagtgcaccctgggacgcaacagaatgaatgtctcttccgtgctgaaaccctgtctgatccccgtgccaatctgcaagaagaaactgctgctcaagctgctgaggggcgcctccagctctaccagcagagatagcagaagctttttcaccagcgctcaccccagcagaccctgcaggatgagactgtaccagatgctgcagaagcagtgctgctacaacctcgtgatcaagcaccctctgatcttccggatcaacctgcggagacagggcaagaccaaagacggcgttgtgcagagcctgggcttcctgaaccagcagatcatcctccagaaagagttcttcatctgcctgctgatgttcatcaagcggtggaagccagccgccaccaagaagggcaagaacagcccctgctgccagaaaaaactgcgggtgcagaaccagggccatctgctgatgattctgctgcacaacagaggcccacctctgcataccagattcgagaaaaagcggcccgagtggctgagcagaaaatccggcgtgatgaagtgctgggatctgtgccctgccttcagcggcaggattctgcaccagccagaaatggccgccatgagactgatgcccaagttcctgaactccaccaacagctggtggacagtgcacaagaagagaggcctgttccaccagatgaagtgtctgaccgccgtggactgtctgcaggccttctgggatatgagcgagaagaaacgcaagctgcctatgattcgcaaaatccagaagcggcggagaaccgccaaccggaacatcgagatcacccctcagagaagcaaagcccacctgaagaaaacctccgccaagggcgccaagaaaatcaccttcctgtgcctgagagtcagatgcggaggctggctgtgtggctggacaccaagaggatggctgaagaagtccaccaagtccagactgtgcttcttctacctgctgtactacctgtttttcctgaccgtgtgcggcttcacccctccaccacttattctgtggcctcaggcagcccctggcgagaagctgaagcactgttttaaagcctggggcgtcgaccctcctggcagcgtttggattctgccctgcttcctgattcacctgagaaaggtggacacccaccacctccaggtggtcaccaaaacagtgaccgccacaacagccgacggccagaggatgagaaggctgaagtgcaaggcctgccggctgagatgggctagacctgaacctgcagctcaggcccctcctaagagccactttccacctcatcctagcggcccctccagaaccagctctctgcaattgagaacctacatggaaatgcactacggccatcaggccccacaggtggcaatgctgcctaaactgctgtgtcggcagatgctccccactctgtctaccctgcagcagagacatcctcagggcccatgtcctcctccagtgacacctctgagagtgcagtctgtgctgctgctcggagtgcctcaaacagctggctacccctacgatgtccctgactatgcgtcctaaaggcgcgcctagcggccgc

SEQ ID NO: 1214 - DNA, 5299 bp, Artificial Sequence
  Cloning cassette hINV 4C
  Cloning cassette hINV 4C (1)..(5299)
gaattcggatcccgcgacttcgccgccatgcatcgacggcgctcacggagttgccgggaagaccaaaagcctgtgatggacgatcagcgggaccttatttctaacaatgaacaacttccgatgcttggtaggcggcctggagcaccagagtccaagtgttctaggggcgccctgtacactggtttctccatcctcgtgacactgttgctggcgggacaggcaacaactgcgtatttcttgtatcagcagcaaggaagactggataagcttacagttacatcccagaatctccaacttgaaaacctcagaatgaagcttccgaagcccccaaagcccgtctccaaaatgaggatggcgacaccgctccttatgcaagcccttcccatgggggctctgccccaagggccaatgcagaacgctacaaagtatggaaatatgacagaggatcatgtcatgcatttgcttcaaaacgctgatccccttaaagtttaccctcctctgaaggggagctttccagaaaatcttcgacatctcaagaacacgatggaaacgattgactggaaggtgtttgagagctggatgcaccattggctcctgttcgagatgtcccggcattctctggagcaaaagccgacggacgcacctcccaaggaaagcctggaattggaggacccgagtagtgggctgggcgtcacaaagcaagacctgggacccgtgccgatggacagcaagaagatgacccagaagaaccgcaagacccggaaggccgccagagagaagcacagaaagaccgacaacctggacctgcagcaccagcgcagacgcaaaaagaagaaggacaaggtcgagatccggaatcggagccctaaggccaatagcaccgagtgtcagggcgagcacagcagagagcagaacctgctgaacctggtgcaattgaaccctcacagccctcaccaccggaaggacgaggaagatcaccagaagagacaccaccaccacaatcaaaagaagatgtccgtcaacgagggcaacaaccactggcctagagtggaaatgcctaccggctggctgctcgtgggctacaacaccagaaacacagcccagaatcctcggctgcagcagcacctgaaacactggcagcagtgcaccagagccagatggtgtcaagagccctgtcagaccctgaccttcttccacttcttcttctttttcaaaacggtgtccctgtgctgccccggctggtctaaaggacaacctcctccacctggcctgaagccttctagcctggcttctcaggtggccagaaccacaggcgtgtaccagcacgtgtggctgatctgcttcgtgtttttcgtgtgcgtggaaaccggcttctgtcacgtggcccaagtgggactcgagagactcgttagcctgagcggcatcaccgacgtgaaccattgggcccagcctaagccatctcctagcaaaggcaccggcatgaacagacccatcggcctgagagttggcaaaggcgtgtgggctagactgtggctgaagaactggaagcggttcaagctcaaaaagaaatacacaggcatggaaatcctgctgtggattctgctgaagatggaaattcagatcttcaagatttgcctgggcgagatgcagctgtgcctcaagaagaaagtcaacgcctgcagcaacgccaagaaaatgcccttccagtgccggtgcagacgcgagtacagagtgaccatgattcagaagaagaaacagaagtccccgctgttcttccacggcgacctgtgcagaccttctccttgcctgtcttggagcagcaggatcgtggctcctggacacgccctgagctgtcggactcgtagaagatggtccagcaagatggccaagaagtcccagcagcctctgtgtagaggcggcccttctgccagcgatagatgctgtagctgtagccccagcggctttagcgctggaagaggcagatgtcctgtgcagggatgtctgaggccacacagagttcagctgctgagaagatggggccctggatctcctgctggccagagactgtctaagggcttccaactgctgcgttggtggggaccaggatctccagctcctgagcctagaaagggcccatttccaccacctgatcctccatggcctgtgaccgctgtgacagtgatggctggctctgtgcctagcgctcagtctgtggatgctctggaatcccctggacctctggctctcgaaggccctagcagccctagaaacctgctctggcgggaaatgagcatcttcctgcctggcatcttcaacctgcacctgtgctactaccacagccagagcaaccggaacaagagccggcagatggaatccctgggcatgaagctgcagatcacacacccattcgccagccagccactgggccaagagatgcccaacaacacccagatcagactgctgaagcccggccaggcctttggcagcttttccgccgatttttcagcccctcagcaggcccctctgagactgtggtcttggtgcggcacaagccagacctacttcggctctatcgaagccctgacagccctgttcacctgtagaaccgccagcatcagcgtgaacatcagcaccctgatgagcatcctggaagccatcctggccatgacactgaccctgaatggcagccctctgtgggactgcagcacaacaacaggcacacaccacggctgcctgtgggagatcccttctgttaccctgctggctaccgccaaaaagagccctaccagcttctgctgtcagcggcctcctctgcagccagtggaagagaagaagaacggccggatcagcagcgtgccaccttctccacctcttgctctgggccctagaatgcagctctgcacccagctggcccggttcttccctattacacctcctgtgtggcacatcctgggacctcagagacacacccctctgctgacccctgacaccagatggatcttctccaaccagctgcagaccgtgcagatgctgtgtctgcctccactgaagcagggcgagagaatcatctggcctctcggcggctttcagatccccaacttcttttggagcctcggcatcggacacactggcgcctggtggcatactggaaggcggagaagagaatggggcggcagcaccgtgtctagaagcccactgtggatcagctccatgatctacctgagaggcatggccttcgcctccgacagcagcatcagaaccaccagagtgtcctggtgtcggagatgtggcgccaaaagcgccgcagccagcagcgacaagaagaagaaaagcaccgaaaagaccaagaacaagatcatctgcaagggccacagaatcacccaggtggtgctgagactgggcaacctgcctccattcttcagaggcagcgaggtgccctttcctagaccttgccggaccaagtgccagaagaaggttccaagcgcctctccttggggactgcacccaagaacagcctccatcacactgcctaccaccagcctgaagggcagcagaacaagctgctgccccagatctcaccccagactgcccagaacaaagtggcctctgcagtgcctgctgcacagcctgggaacaactggaacactcgtgtgggaaaggggcgtgctgcagatgagaagtctggaagctcactgccctctgcagacattccacctccaccactgcagaacccagcctagctcttgtcctccagcctggattctgtaccaaggacagtggagcggagccgtcgtgggacttagacctgtggctcaccatctgccaagacctatccaggggctgcactgtcctcaggctcctcatcaaccagctctgtcctggggaaagtggcccgtgggaatgacaggacccgccagatgttgccggtggcctagaagaatgtgtagctctctggccctgccaaccggcctgacatctctgatcctgcctagcagtgatctggccgtgctgatctctagctccaccagccactttctgatgcggagcccagtgctgccaagcagcagactgacatgtgcctctccacagctgcctcggatgtggacatggtctagctggctgaaagagtggggaggacaggcccacagacagcggaactgtagagtgaacgccgttgaggaactgcacagcaggcggatgtctgtgcggatcgtgaagaattgggtgtcctgctgttacgtgcggctgagtgcagtgggactgtctacttggagcgccctggattccctgatcctgtccttccagagagtgaaaaccagccggatactgaacctccaggtgctgaagaagatcctgcggagctttatgaagctgtaccactctctcgtgatgtgcctgcggctgcggaccaagctggaaaaagctctgagcgctctgtttatctggccccagcacagctacaaaggccaggcattcggaagcctgtgccagctggtgtctgccgatttcagcgcccctcaagtgaccagactgcggagcctgaaccatctgctgattcggtggatctttagcaatcagctgacagtccaaatgctctgcctgccgatcatcaagaaaatgaagaaacggatcatggtgcacgtcttgaagaagaatcggaagcagattatctgtatcaagaatatgttcctgcagcggaagggattcctgaacctgagccacgtggaaaagttcagagagagcaccctgggcaatttctggatgaagctcctgcagctgccaccagcttgcacctctaaggcctggacacccagaaagcttgtggggagagccgtgcggagaaagggcgtcgtgatcaacctgaagagactgcagaaattccgggctagcgtgtccttctggactctgctgcctacaacaggcgtgcggacaagaggctctccactgagactgactctgtggcctccaagaagccagaaaagccagcaccactgcgccctgagaaagatcgagtgggccacaaagctgtccctcggcggcaaagcaggaccacaggctcaagagaaggccaacatcctgaacagcctgccttcctctatggaaatcgccgtgctgcaagaaatgctgaaccagaagtgtctggcccctttcgagcttaagaagaacctcctgctgccaacctacacaccccacatctgtcggcacacccttaaaaagaagcccagagacatctgcagaatcagcggctacccctacgatgtccctgactatgcgtcctaaaggcgcgcctagcggccgc

SEQ ID NO: 1215 - DNA, 5299 bp, Artificial Sequence
  Cloning cassette hINV 1D
gaattcggatcccgcgacttcgccgccatgcatcgacggcgctcacggagttgccgggaagaccaaaagcctgtgatggacgatcagcgggaccttatttctaacaatgaacaacttccgatgcttggtaggcggcctggagcaccagagtccaagtgttctaggggcgccctgtacactggtttctccatcctcgtgacactgttgctggcgggacaggcaacaactgcgtatttcttgtatcagcagcaaggaagactggataagcttacagttacatcccagaatctccaacttgaaaacctcagaatgaagcttccgaagcccccaaagcccgtctccaaaatgaggatggcgacaccgctccttatgcaagcccttcccatgggggctctgccccaagggccaatgcagaacgctacaaagtatggaaatatgacagaggatcatgtcatgcatttgcttcaaaacgctgatccccttaaagtttaccctcctctgaaggggagctttccagaaaatcttcgacatctcaagaacacgatggaaacgattgactggaaggtgtttgagagctggatgcaccattggctcctgttcgagatgtcccggcattctctggagcaaaagccgacggacgcacctcccaaggaaagcctggaattggaggacccgagtagtgggctgggcgtcacaaagcaagacctgggacccgtgccgatggccgacaagaaaaacgtgcggagcgctagttctcctggacatcctcttggccccagaagaatgaccagacggaccatgaccaccaccaaaatgatgatgatgcggcggaccaagcggcggagaagaaaaagacgccggatgaccatgatgaccagaagaaccctgctgaccaagaaaacctgtctgacccctagaaccagcgccgccacaaaagctctgcccagacagacaatcagccagcggaggcctatccagacacctcctggaacaagcctggccatctggggcagaagaagcaagatcgaggcctctcctatcggcagcatcacccctctgagcatcagcagacctaccagcagagccagacagagctgttgcctgcctggactgacacaccctgctcatcagcctctgggctctatggttggagctggaacaggcggaggacctgcttgtgtgcctgtggccgaagcttctacaggcgcttggacagctgaaggcgctgccggcacaagatgtagagccagcagagccccttgcagacagctgcctgcttctagccctaccaagtgcgagatctgcgtgaagagaagaaggcggcgcaagcggagcagccagtctagatctcccgtgcctaagaaacgcgagcggatgatgctccctgtgcgggccagaacagctagatctgctctgccacaaggcagggctcctctggaaggaatgcttctgcctagagcactgcccagcctgctgagcagaatgcctgccagaagagagagcagattctggctggccctgcaggcccttggactcagacctcctcatctgcctagctgtcaccctctgcctcaactgcttggacctcctccacctcatcaggcccctggcgagaaaaacgacctgcagctgttcgtgatgagcgacaccacctacaagatctactggaccgtgatcctgctgaacccctgcggcaacctgcacctgaaaaccaccagcctgaacgccaagaaaatggaagatatgatctgggagagcaaccagcagctgaagtggacccctcacatcctgaagtccgcctctatcgccaagaagcggatcaagctgcggcggaacagcaccagacgggaaatgccttctcaggccacaccttctccacctggaccttggagagccgctctgggcaaagaagtgaagcggagccagagcaagctgagactgagaaacacaagccccttcgacaaaaagggctttgtgatcctgagcaacatgggcggcaaccggtctatctgcctgaccatcgtgttctttctggccccttacttccccatgcctagcagctggtctagcagcggcagaaccagactgcctctgaggccacagagaggccctagacctctgcatagatggctgcagcagaccaccggctgctctcagagaagaggcgactgcccaagaaccatggccggaccatctgcttctctgcaccctgcatctggcagagcctccagaaagacctggcagagaaggctgagagcctgtagagcaggcggacctgctggatgggctagacaggccagaaaacgcaagagagagaagcggtcccagaagtccagacagaaccatctgcagctgaaaagctgcagacggaagatcagcaactggtctaagctgcggagcccctggatcttcgaggccaaaaagagcatgaagagatcccagcggcctcctcggagcatcctgagcctgttcaagaagaagaagcccctgacattcagccccagcgtgtccaagaagaggctgcctaagctgaagggcaagaaacgccggaaagaaatccagcggaaggtggtcaagaaccccagccagcctgtgccactgagaaatgacggcatcaccaacggcaacgacagcacccggtcttgcagcatcagcctgaagaaaagcctggaaaagatgcccctgatgcggagcctgctgtactccagaatgtgcctggtgcagatccccacacacacctgggagcccgactactttgtgtccctgcctatgatgttcagctgggccacacagagctttccagtgggcgccgtgtttctgaccagacctgccattccttgctgtagctgtaccagccactccaatccttggagccagtccacactggccatccggtttatctctgcccctcagccaagcagcagcaccgttacagctgctcctagcggccagtattttgccctgcggagtatgcccaagagccggaaccaggtgctgtttcggagaaatctgaccccaagccagctgcggacactggcccctccatatatgctgctgcctcagtctctgtcccagagcctgtctcggaagcagatcccatctcagtccatgctcgtgcggaccaggctgacactgacaggcactagaagctccggcaccagagcctctccatctgccgtgtgtctgtgctgctggacatgccccagcagaagctttcctgccgcctctccaagcggactgagagcacctgttggagcacaggctcctccagaagtgacactgagagccagctgtgccagctccgccagcaaagcttgtgcaggactttggccttggggagcccaagtgcggatgaagaagaaggacagcaccatcttcatctaccccaggctgaaaaccttcggcgtgccactgggcagcattctgtgtctggctggaagcctgagcacgatgatgatcattagcaccaccagacaagagtgcggcagacgggccagcgtgccctgtagacctatgatcggaagcgccagacctggaccatggcggacaagtgctatgccttctgccatgggagtcgccctgcctaccagctgtgaaagcggaagatctcctcctgccaccggcggaagaatgccaggatctcagtctatcatgatgagctggatgcctccactggctccctgcgctgcttgtccttgttctcctgctcctacactgtgccctgctcaccctgctagagcaccaacagccgtgcctgcctttacacccctgtctgctcatcctgtgccagtgctgtctggatgtcacctggctgtgcggacctccatgcttaccttgctgccaatgatgaccctgaaggccctggtcaagacatggacccagttcagaaactaccccagacggcaccctcacagaagcccaccaacaagctgtcctccactgctcgaggcctttccactgccaagagccagcctgagagctaccgtgcctagacactctagcgtgctggccacaggactgcatctgcataggcagattagcctgcctctgcggggcttcctgctgcatcaaccactgccaggacaacacctgtggctgtcccacagactgagactgcggctgcctagaacaaccgagatccagctgaccatgaacgactccaagcacaagctggaaagccccgctctgaaacaggtgtccccagctagtcctcctacacagcagcctcagacaccccaggattctagacaggtgctggccgtgcctatgagcctggcctgtagcatcaccgtgtccttcgtgggccagatctctaccctggtgctggacgtgtcctccatcagccactggaacggcatctgggaagtgatgcccagaacactggaaggctgcatctccgtgaaggaccaccggacatcccagaaccacagcaagtgcatcaccgagtgtgtgcggacagccctgaacaccaagtgtgaaatttgtgtgaagaacaccgccatcctggctatcaccctgatcaccccacaggaccctcacctggaccctgtgtgtcatccccatagaaggcccggctggaagggacaccacagagtggtgtttagccaccatccttccggcagcaccaagtctcactggcagcagagagaaagaggcggaggccgcagagaaaagaagggctgtagagaggcaagcagagccggccagtttcctgtgtggcggagaacatctagaggcatgtccctgcagtggaagtccggcaatgcctgcacacctctgagatgtcccagcagatctccagccaccttcctgactgccctgaacggctggcatagatctggactgagggcccagaccgccttctttctgctggacatcatcctgcggagagcccggcctacaagctgcagcacatgtagaatgtggtggcggctgccctgcaaagtgaccgaaagctccctggccaagaaaaccctgaccaatcagcctagcttgcccggaccttgtgctagcctgctgtctacactgagccagccaccacctcaggctcctagccaagtttggacagccgctacactgcggtgtcctgctgtgcctgctgctgcatgtccacctctgaagctggctccactgcaagtgaccacaacactgaagctgatcctggtcatgctggaaatcgtgaccgagaacaaagttcggcagaacttcaagcggaactccagcttcttctacaccagcgacagaggctacccctacgatgtccctgactatgcgtcctaaaggcgcgcctagcggccgc

SEQ ID NO: 1216 - DNA, 5281 bp, Artificial Sequence
  Cloning cassette hINV 2D
gaattcggatcccgcgacttcgccgccatgcatcgacggcgctcacggagttgccgggaagaccaaaagcctgtgatggacgatcagcgggaccttatttctaacaatgaacaacttccgatgcttggtaggcggcctggagcaccagagtccaagtgttctaggggcgccctgtacactggtttctccatcctcgtgacactgttgctggcgggacaggcaacaactgcgtatttcttgtatcagcagcaaggaagactggataagcttacagttacatcccagaatctccaacttgaaaacctcagaatgaagcttccgaagcccccaaagcccgtctccaaaatgaggatggcgacaccgctccttatgcaagcccttcccatgggggctctgccccaagggccaatgcagaacgctacaaagtatggaaatatgacagaggatcatgtcatgcatttgcttcaaaacgctgatccccttaaagtttaccctcctctgaaggggagctttccagaaaatcttcgacatctcaagaacacgatggaaacgattgactggaaggtgtttgagagctggatgcaccattggctcctgttcgagatgtcccggcattctctggagcaaaagccgacggacgcacctcccaaggaaagcctggaattggaggacccgagtagtgggctgggcgtcacaaagcaagacctgggacccgtgccgatgcggaagatgcagagcctgaatcaccccagcagactgaccaacaatcctcggagaaagacctggaagatgcggaagaagtacgcccagaagcctagccagaagaaccacctgtaccggcagatcaaccggcgcaagctgcagagaaagaagtccagaagccacctggacttcagcccctactggatgaagaaagtgaagcgggccagaaaccggaacatgaagaaaaccatgagccacctgatcgcccatcaggccctgaagatgtctggcctgagactgtttcaccccagactgctgaccagaaagaagcccggcaagcagaaaaagggccacatgatcttcagccggcggaagtggcagatccggcacgtgctgaagaatctgatccccagcctgaacgcccagtggatgttcctgagaatcgctagcccacagatcatgcagagaaccagcgccgaccggttccggatgaagcggagaatgcagaacctggacaatctgggcgtgccctggcctctgttgcctggattgctgctggcccatatgtacggcttcagcacctacggcacccagaaaggcgagtgcgtgtgtctgcagtgtctgagcggcagcagcctgttcatcctgaagcagcccctggacctgaagatctccaagaccttcatggccagccctcagattatgcagcggatgagcgccgtgaacttcgagacaatcctgcaggcccatcctcaggtgccagctcttgctcctcaagcttggtggcccgctagaagaggccctctgacatctgctccaagcgcacagcagtccctgacacggacactggaaagcgccggactgtttccttggctgcacacccagtgccgggccttcattcacacacctagaagccctggctgcagcgtgtacgccaacatgtgctggcggtacaagaaacggggagtgatcgcctggcggatctaccctcctagcacatgcagcctgccttgcagaggcctgatcctgattcagcacggcggcatcttcaccttccggttctgggtcgagaagctgagctggaacatctgcaagaacctgagcctgtacctggataagttcgtgcagcggctgctgtacgtgtacatcatcgagacaaacgtgttcgtgctgaacctgttccacgtgccagtgaaccagatcttcatgatggccttctacctgaagtacaccgagaaggcctgggtcatggaactggaatggctgatccagcagcagtgctaccagcggaagagaatgaagaccggcgccatccaagagaagggcgctattcaagagaaaggggccatgaccaagcggatctgcgtggtcaatttcgaggcctgcagagagatggaaagcctgagcgcccctgagaagatcaccctgtttgaagcccacatggcccggtgcaccagcatcaatgtgctgtgtgtcagggccagcctgatcgagaaactgatgaaagaaaagcgcaagatgaagcgcaaccaggtggcatcccctcaaatcatgcaacggctgttcatcaagggctaccagaacaaccacttcacgttccacctccaaaacttcgccttcttcagctccttcggcaacaacaagtatatcaacatcctgacctttctgcccagcagattcccttggggacctcctccactgggagcccttagagctacagctcctgctacagctgctccccaggcacagacacctcattggagagccgccaccacaagcagcatgagcagctctccaagagccgagcctaccagctctagctcttgggccacttgctggcctagatgctgcagctccagctgctattggagcctgtctagctggcctcctgctggcgctgccgaagccacaaataccagaaccagaagccgcgagagccagcggggaagaatgctgacttggagaagctccctgtggctgcagggcaccagatgttttacaggcgtgcggaccagctccaggtgcagcctgatggaacagatccctcacctgaagtctaacagccggaagaaactgctcgaggacatgaagcagaacggcttcaccagacggcggaacagcagaaagcagagccaagtgcagctggccatccaggtgctgctggtggacaagcacaagtactttctgttcggcagagccacatttctgctggctctgtgggagtgtagcctgcctcaggctagactgtgcctgatcgtgtctagaaccctgctgctcgtgcagtctagacacccaagctggccttggaccagatgcctgagaatgcggcctccacgcagccactggaactctgcctacctggggagaacactgctcgtgacctgcatcctgtaccacagatggatcgtgaccagcatgtgccagagccagagatggctgacctccaccacctctagaagctctgccctgatgtggacctggtggtgtacaagaggtggcggcaagcggaagaaaaagatgtgcaaggtgtccggcggctgcaccgcctgtgttgaaagatgtccttggaagggcatctgttggaagtggcctgtgacagtggccgccatgagcagaacacctccaagacgcgtgtgcggccacagagagggcagcgagtctgataatctgggcctgctgtactcctttccacctgtgctgttcaaggccgaccagagcgaaagctctctgagcagcggcaacagcgtgatcgtgcacaagatcgtgctggtgttcctgaagtccctgagcagctacaactgcgagagaagaatcagcggcatccagaagagagccatcgagttcgccgtcctgaagctgctgaacatggacctcggcaagggactgacacaccccgtgcctctgaagaggaccctgcagaacaagcggaacaagaacatcaagcgggtcaaccagaagaagggcaacatcaagaggaagtccatcctgctgcatctgattgtgctgaacagccccgagagcaaccgggaaaagatcatcaaccccaccatcagctgcccctttcagagccccacaaagagactgggaagccctcctctgcacctgtgtcagcctctgaggccctatcctatcagcgagggcctgaccatgaccaccggcagaaacatcaacagcaactccctgatgaccaactgcctgttcagccccatcttcctgtgccaccacgccatcatgcaccggaagatgacaagccctcacttcagactgttctccagcaagatcccacatccacaggtcccaagtgtggtggccctgtgcaagtttacacacccctgcaccatgctgctgccccaaggcgctttttggaagcctcctagccagggcatctccagctgtctgatgacaggctgttggcagtggtccagcgtgacaagcctggaatggacagcccaagagagaggctgttcctcctggctgatgaagcaaacatggatgaagtcttggtccctgcgggaccccagctacagatccatcctggaatacgtgtccacacgggtgctgtggatgcccacctctaccgtgcctaagttctttctgaccttcagccagatccggatgtgcgccctgtctcaccctagcttctacatcagctccaccgtgtgctttctgagcaagcactgcatgaccgcctgcacacctggaaccagcctgcagtgttacctgaacctggccaacggcctgtggttcaacctgatcttccggaacaaaaagaccaagctgtggttctccctgattaacatccaccaccgcaagaacccactgctgcccatgcggctggaaaaaaaggccacttggatgcggcggaccgagctgtctctggaaccttggattccttacctgcatcagcagaaaacccagtggctccccatgagaagcctgggcgagccttggcgagctggatttcagtggggagagtctccctggcaagtgatggcctctctgacaggcagacgcaagaaaagagaggatcactgcggactgcaagagaaaaaaagccggaagctgatgtccagctgcgccgctcctccacatagactgctgggacctagcagatggggaagctgtgggagagcctgttcttgtggcagaggctgtggaacccctagaggcgactggaagagacacccacctcggcggattctgtttcacgtgcggaacatcgtgtacggaatccaagtgatgctgtgctgtcaccccgcctggctgtctccaatcagcgcttgtcctcgcctgctgccttatccattccacgttctggccctggaagtgacattccctccaggcactgccatgcctcagatgcaattgcaggcactggcaatgtgggagaaaggctgggacaagcctctggaaaacacacagatccccaggacaagcccactgtggaagatcacaatggtgctgacataccccaactgcgtggtgcacgtcctgatgttcggcggcaagaagcggagcaagttcggctacccctacgatgtccctgactatgcgtcctaaaggcgcgcctagcggccgc

SEQ ID NO: 1217 - DNA, 5296 bp, Artificial Sequence
  Cloning cassette hINV 3D
gaattcggatcccgcgacttcgccgccatgcatcgacggcgctcacggagttgccgggaagaccaaaagcctgtgatggacgatcagcgggaccttatttctaacaatgaacaacttccgatgcttggtaggcggcctggagcaccagagtccaagtgttctaggggcgccctgtacactggtttctccatcctcgtgacactgttgctggcgggacaggcaacaactgcgtatttcttgtatcagcagcaaggaagactggataagcttacagttacatcccagaatctccaacttgaaaacctcagaatgaagcttccgaagcccccaaagcccgtctccaaaatgaggatggcgacaccgctccttatgcaagcccttcccatgggggctctgccccaagggccaatgcagaacgctacaaagtatggaaatatgacagaggatcatgtcatgcatttgcttcaaaacgctgatccccttaaagtttaccctcctctgaaggggagctttccagaaaatcttcgacatctcaagaacacgatggaaacgattgactggaaggtgtttgagagctggatgcaccattggctcctgttcgagatgtcccggcattctctggagcaaaagccgacggacgcacctcccaaggaaagcctggaattggaggacccgagtagtgggctgggcgtcacaaagcaagacctgggacccgtgccgatgcagaacaccagaagcaccaacctggaaaagaaccccagcctgaagaagcagagccagcggagaggaaagctgagcagcagaaagaagggccacaccaagaaccggcggaaggccaagagaaagccccagatcagccagaagaaggaccctgccggcaagctgaagaaacacctgaaccggaagctgcacctgaccagatcctgcctgatcgacctgaccatgatgatgagccagaagctgtggaagaaccagcgcaagagaatccctctgccttctccacggcagcatctgctgcctcagtatccactgcatcctccacctccatgcctgctgctgctccaccacagacaccatctggcctttctcgagatggcctgcagcagccagcacacccacagcatcaagatctggatcagcttcagccacgaggacctgcctagaatgctgcccatcagcagccctctgcacagaccccagatgcctttctggacctgcacctttcctgccaccacatggggcacatgggagacaccttctacatggggctggcggacattcggccctgtgtactacgtgtgcaaccggatgaacgtgtccagcgtgctgaagcctttcctgttcaccgtgcctatcgaggacatgagagagtgcaccctgggcagaaacagaatgaatgtgtcctctgtgctgaaaccctgtctgatccccgtgccaatcctgaccacactgagcttcgtgctgatcgaggaaagccggcggaacagacggtacagaaagatctacggggagctgaagatgtccctgcaggccctgcctctgacctttagcacactgctgtgggacagcagacacaccaccaccacaagcagccccagaagatcccctgctctgagagctagaggcggcaccacaatcggcgaagtgacaagcagaggcgccagcagctctaccagcagagacagcagaagctttttcaccagcgctcaccccagcagaccctgcagaatgagactgtaccagagcaacggcatggaagcctgcggcacacaccctacacctagactgtctagaggccctccactgcacaccagaaccatgagcctgagcaacatcctgatgaagttccggctgatgctgcagaagcagtgctgctacaacctcgtgatcaagcaccctctgatcttccggatcaacctgcggagacagggcaagaccaaagacggcgttgtgcagagcctgggcttcctgaaccagcagatcatcctgcagaaagagttcttcatctgcctgctgatgttcatcaagcggtggaagccagccgccacaaagacacctccaccactgattctgtggcctcaggccgctcctgtgcacaagaagagaggcctgttcagcctgttcttctcccactgcctgtgccaccagatgaagtgcctgaccgccgtggattgtctgcaggccttctgggacatgatgattcgcaagatccagaagcggcggagaaccgccaaccggctgaaaaagaaatacctggtgcagtgtaccaacctgagcgtgcccatgatgctgaccatcctgatctggaagcgggtgttcatcctcctgctgagcgacaagaagtgtctgagagtcagatgcggcggatggctgtgtggctggacacctagaggcaagaacaagaagcggagaaagctgcggcccaagcacctgaagaaaaccagcgccaaggtgtccgtgatcaccatgaagctctgggagaagcacttcaagggcctgaactggaacctggtcgtgtggattctgaacctgaagatgatgtggctcaagaagtccaccaagagcagacagagcagcccattcctggctcggagctggaataccatgcaatggaacaacaagaaaatggccatgaccgtgatcgctggcgcccaccactgtcagtacaagctgacctacaccaaagtgtggaagatgaattggaagaaaatgatgatcggctcccagcacctcctgtttagcccactggattcaagcccactgcagttgctgctgcaccctcacggcaagagatgcaacccttgctgcagactgacctggatgagcagagagtgggaaaagcggaagcagatcctcggcggaggcggcaagtacaaagagtacttcctgaagcggattctcatccggaaggctatgacagtgctggccggcgataagaaaggcctgggaagattcatgagatgcgtgcagagcgagacaaaggccgtgtctctgcagctgcctctcggccgaagaaagtccggcgtgatgaagtgttgggatctgtgccccagactggactttcaccccagatctagctctggcggcgagaagctgaagcactgtttcaaagcctggggcctgtgcttcttctacctgctgtacttcgagaagaaacggcccgagtggctgagcgttgaccctcctggatctgtctggattctgccctgcatggacctggacggaatgctgacagtgatcggccagggactcgtgggcatgacccctagagatctgggaacagtggctggcgccaccgcacagattcagaggcctatccaggtgcagacaggcggcagactgttcctgattcacctgagaaaggtggacacccaccatctgcaggtcgtgaccaagaccgtgacagccacaacagctgacggccagaggatgcggagactgaagtgcaaggcctgtcggctgagatgggccagacctgaacctgctgcacaggctcctccaaagagccactttccacctcatcctagcggcccctccagaacctctagcctgcagctcagacccattcctccacacctgagacacccactgctgctgaagggaaagaacagcccctgctgccaaaagaaactgcgggtgcagaaccagggccatctgctgatgatcctgctgcataacgccagacagcccagcaggcctaccggaagaacccctaccacaagactgatggcccctgtgggcagcgtgatgtcttgtagcctgctgacccagccatctcctgccagcgcatgtacaatgccaccactcctgcatccacagtgggccccacatagtgctggactgtctccaggcgcttgcagacctgcctgtacctgcatcagcatgaccaccatctccagagccacatggcggctgagaatcccaagcctgaggaagtaccggcagaacatcgagatcacccctcagcggtctaaggcccaggtttccgtgtacagcggcaatctgctgagcttctccagacggggcatgaagagtagcgtgcggctgaagaacagcatccctcacgtgccaaaagccaccgccgctcactctgtgacagtgaagctgcagtacctgtttttcctgaccgtgtgcggcttcgaccgggtgttcctggttaagatctgcaagaagaagctgctcctcaagctgctgagaggccccagacggaaagtgctgatggtgctttggctgcccgccaaccagagtctgcagaaaagccaggtgttccagtgggtgctgcggaccgaaacctacatggaaatgcactacggccatcaggcccctcaggtggccatgctgcctaaactgctgtgtagacagatgctccccactctgtccacactccagcagaggcatcctcagggaccttgtcctcctcctgtgacacctctgagagtgcagtctgtgctgctcctgggagtgcctcagacagccgcttttagcggccggattctgcaccagccagaaatggccgccatgagactgatgcccaagttcctgaactccaccaacagctggtggacagtggcccctagatgtcctagaagcgccgtggacattagccccggacctacatctcctagcctggcctcttgtgcctctgtggccattggaaaactggcactgctgggcgcatctgccccttgtggcgcagctggtgctagagaggctggaagatttgccgtgctgggcaccatggttatgaagggtgctgccgcagcctcctgtcagtctcctccatctccaagagagacaacccctagcagcgacgccaccagacggacaagacctattgccgctcagagcaaaaagaccatgactgccgccggactgacccctcggagaaacctgcagagaaatctgaaggtcctgggcgccaagaagatcaccttcctgagaaacagcagacgcgccacacctacctctaagggcagcctgagaagaaagtacctgagagtgaacatccgcaagctcatctggaccaagcagcggagcttcctgtctctgttccccaagctgagagccaccgagcagatgaccaatgtgggatgcctgctcaagaaaagcagccaattgcggcggagctggcgcaatgtgtcccggatcagcaacatggaacacaggctgaccatggacagcgccctgagcctgacaaagagagagggccctgagacaagcgagaagaagaggaagttgcctggctacccctacgatgtccctgactatgcgtcctaaaggcgcgcctagcggccgc

SEQ ID NO: 1218 - DNA, 5299 bp, Artificial Sequence
  Cloning cassette hINV 4D
gaattcggatcccgcgacttcgccgccatgcatcgacggcgctcacggagttgccgggaagaccaaaagcctgtgatggacgatcagcgggaccttatttctaacaatgaacaacttccgatgcttggtaggcggcctggagcaccagagtccaagtgttctaggggcgccctgtacactggtttctccatcctcgtgacactgttgctggcgggacaggcaacaactgcgtatttcttgtatcagcagcaaggaagactggataagcttacagttacatcccagaatctccaacttgaaaacctcagaatgaagcttccgaagcccccaaagcccgtctccaaaatgaggatggcgacaccgctccttatgcaagcccttcccatgggggctctgccccaagggccaatgcagaacgctacaaagtatggaaatatgacagaggatcatgtcatgcatttgcttcaaaacgctgatccccttaaagtttaccctcctctgaaggggagctttccagaaaatcttcgacatctcaagaacacgatggaaacgattgactggaaggtgtttgagagctggatgcaccattggctcctgttcgagatgtcccggcattctctggagcaaaagccgacggacgcacctcccaaggaaagcctggaattggaggacccgagtagtgggctgggcgtcacaaagcaagacctgggacccgtgccgatgaacagaaagaccagaaaggccgccagagagaagcaccgcaagaccgacgacaagaagaagaagtccaccgaaaagaccaagaacgccaagaagatgcccttccagcagcggcctcctctgcagcctgttaacctggatctgcagcaccagcgcagacgcaaaaagaagaaagacaaggtcgaaatccggaatcggagccctaaggccaatagcaccgagtgtcagggcgagcacagcagagagcagaacctgctgaatctggtgcagctgaaccctcacagccctcaccacagaaaggacgaagaggaccaccagaagcggcaccaccaccacaatcaaaagaaaatgagcgtgcgggctagcgtgtccttctggacacttttgccaacaaccggcgtgcggacaagaggctctccactgagactgacactgtggcctccacgggttccaccttctccacctcttgctctgggccccagaatgcagctgtgtacccagctcgcccggttcttccctatcacacctcctgtgtggcacatcctgggacctcagagacacacacctcaggctcctctgaggctgtggtcttggtgcggcacaagccagacctacttcggcagcagaccatctccttgcctgagctggtccagcagaattgtggcccctggacacgccctgagctgtcggactagaagaagatggtctagcaagcggtggatcttctccaaccagctgaccgtgcagatgctgtgcctgccaatcacacacccattcgcctctcagcctctgggacaagagatgcccaacaacacccagatccggctgctgaagccctgcagagtgaacgccgtggaagaactgcacagcaggcggatgtctgtgcggatcgtgaagaactgggtgtcctgctgttacgtgcggctgtctgctgtgggcctgtctacttggagtgccctggacgaggaaaagaagaacggccggatcagcagcctgaaaaagaaagtgaatgcctgcagctccctgatcctgagcttccagcgcgtgaaaaccggcatggaaatcctgctgtggattctgctgaagatggaaattcagatcttcaagatttgcctgggcgagatgcagctctgcggccaggcctttggaagctttagcgccgatttcagcgcccctcagatcattaagaagatgaagaaacggatcatggtgcacgagctgaagaagaatctgctgctgcctatgtgctccagcctggctctgccaacaggcctgacatctctgatcctgcctagcagcgatctggccgtgctgatctctagctccaccagccactttctgatgcggagccctgtgctgccaagcagcagactgacttgtgcctctccacagctgccccggatgtggacttggtctagctggctgaagaacgagggcaacaaccactggcctagagtggaaatgcctaccggctggctgctcgtcggctacaacaccagaaacacagcccagaatcctcggctgcagcagcacctgaaacactggcagcagtgcaccagagccagatggtgtcaagagccctgtcagaccctgaccttcttccatttcttcttctttttcaaaacggtgtccctgtgttgccccggctggtctaaaggacaacctcctccacctggcctgaagccttctagcctggcttctcaggtggccagaaccacaggcgtgtaccagcacgtgtggctgatctgtttcgtgtttttcgtgtgtgtggaaaccggcttctgtcacgtggcccaagtgggactcgagagactggtgtctctgtccggcatcaccgacgtgaaccattgggcccagcctaagccatctcctagcaaaggcaccggcatgaacagacccatcggcctgagagttggcaaaggcgtgtgggccagactgatcctggccatgacactgaccctgaacggcatggccaagaagtcccagcagcctctgcaggtcgtgctgagactgggaaacctgcctccattcttcagaggcagcgaggtgccctttcctagaccttgtcggaccaagcctgcctgcacaagcaaggcctggactcccagaaaactcgtggggagagccgtgcggagaaagggatctccactctgggattgctccaccacaacaggcacacaccacggatgcctgtgggagatcccatctgtgaccctgctggcccatcctagaaccgcctctatcaccctgcctaccacaagcctgaagggctccagaaccagctgctgccctagatctcaccccagactgcctaggaccaaatggcccctgcagtgtctgctgcacagcctgggaacaaccggaacactcgtttgggaaaggggcgtcctgcagatgagatccctcgaagcccattgtccactgcagaccttccatctgcaccactgcaggacccagcctagctcttgtcctcctgcctggattctgtaccaaggacagtggagcggagccgtcgtgggacttagacctgtggctcaccatctgcctagacctatccagggcctgcactgtccacaggcacctcatcaacctgctctgagctggggaaaatggcccgtgggaatgacaggccctgccagatgttgcagatggcccagacggtgccagaagaaggttccatcagcctctccatggggcctcgtgctcaaaaagaaccggaaacagatgctgaaccagaagtgtctggccccttttagagagagcaccctgggcaatttctggatgaagctgctccagctgcctgtcgtgatcaacctgaagagactgcagaagttcaacctgcacctgtgctactaccacagccagagcaacagaaacaagagccgccagatggaatccctgggcatgaagttgcagtcccagaaatcccagcaccactgtgccctgcggaagatcgagtgggccacaaagttgtctctcggcggaaaagccggaccacaggctcaagagaaggccacctctcggattctgaacctgcaagtgctcaagaagatcctgcggagctttatgaagctgtaccactctctggtcatgtgcctgcggctgaggaccaagctggaaaaggctctgagcgccctgttcatctggccccagcacagctacaagcccctgttctttcacggcgacctgtgcgagtggggaggccaggctcatagacagcggaactggctgaaaaactggaagcggttcaagcttaaaaagaagtacatccagaagaagaagcagaagtctaacaagatcatctgcaagggccaccgcatcaccatcatctgtatcaagaatatgttcctgcagcgcaagggcttcctgaacctgagccacgtggaaaagttctgtagaggcggccctagcgccagcgatagatgctgttcttgtagccccagcggcttcagtgccggcagaggaagatgtcctgttcagggctgtctgaggccccacagagttcaactgctgagaagatggggccctggctctcctgctggacagaggctgtctaagggctttcagctgctccgttggtggggaccaggatctcctgctcctgagcctagaaagggcccatttccaccacctgatcctccatggcctgtgaccgctgtgacagtgatggctggatctgtgcctagtgctcagtctgtggacgccctggaatctcctggacctctggctctcgaaggacctagcagccctagaaacctgctttggagagagatgagcatctttctgcccggcatcttcaccgccaagaaaagccccaccagcttttgctgcaatatcctgaacagcctgccaagctctatggaaatcgccgtgctgcaagaggacagcaaaaagatgacccagaagggccaagccttcggctccctgtgtcagcttgtgtccgctgacttctctgcccctcaagtgacccggctgcggagcctgaatcatctgctgatcacctacacaccccacatctgcagacacaccctgctgacccctgacaccagatggatctttagcaatcagctgcagacagtccagatgctctgtctgcctccactgaagcagggcgagagaatcatttggcccctcggcggctttcagatccccaacttcttttggagcctcggcatcggacacactggcgcctggtggcatactggaaggcggagaagagaatggggcggcagcaccgtgtctagaagccctctgtggatcagctccatgatctacctgagaggcatggccttcgccagcgacagcagcatcagaaccaccagagtgtcctggtgcagaagatgcggcgccaaaagcgctgccgccagctctattgaagctctgaccgctctgtttacctgccggaccgccagcatcagcgtgaacatcagcaccctgatgtccatcctggaagcacttaagaagaaacccagagacatctgccgcatcagctgccggtgtagacgcgagtacagagtgactatgggctacccctacgatgtccctgactatgcgtcctaaaggcgcgcctagcggccgc

SEQ ID NO: 1219 - DNA, 37184 bp, Great Ape Adenovirus
catcatcaataatataccttattttggattgaggccaatatgataatgaggtgggcggggcgaggcggggcgggtgacgtaggacgcgcgagtagggttgggaggtgtggcggaagtgtggcatttgcaagtgggaggagctgacatgcaatcttccgtcgcggaaaatgtgacgtttttgatgagcgccgcctacctccggaagtgccaattttcgcgcgcttttcaccggatatcgtagtaattttgggcgggaccatgtaagatttggccattttcgcgcgaaaagtgaaacggggaagtgaaaactgaataatagggcgttagtcatagcgcgtaatatttaccgagggccgagggactttgaccgattacgtggaggactcgcccaggtgttttttacgtgaatttccgcgttccgggtcaaagtctccgtttttattgtcgccgtcatctgacgcggagggtatttaaacccgctgcgctcctaaagaggccactcttgagtgccagcgagaagagttttctcctccgctccgtttcggcgatcgaaaaatgagacatttagcctgcactccgggtcttttgtccggccgggcggcgtccgagcttttggacgctttgctcaatgaggttctgagcgatgattttccgtctactacccactttagcccacctactcttcacgaactgtacgatctggatgtactggtggatgtgaacgatcccaacgaggaggcggtttctacgttttttcccgagtctgcgcttttggctgcccaggagggatttgacctacacactccgccgctgcctattttagagtctccgctgccggagcccagtggtataccttatatgcctgaactgcttcccgaagtggtagacctgacctgccacgagccgggctttccgcccagcgacgatgagggtgagccttttgctttagactatgctgagatacctgggctcggttgcaggtcttgtgcatatcatcagagggttaccggagaccccgaggttaagtgttcgctgtgctatatgaggctgacctcttcctttatctacagtaagtttttttgtgtaggtgggctttttgggtaggtgggttttgtggcaggacaggtgtaaatgttgcttgtgttttttgtacctgcaggtccggtgtccgagccagacccggagcccgaccgcgatcccgagccggatcccgagcctcctcgcaggccaaggaaattaccttccattttgtgcaagcctaagacacctgtgaggaccagcgaggcggacagcactgactctggcacttctacctctcctcctgaaattcacccagtggttcctctgggtatacatagacctgttgctgttagagtttgcgggcgacgccctgcagtagagtgcattgaggacttgcttaacgatcccgagggacctttggacttgagcattaaacgccctaggcaataaaccccacctaagtaataaaccccacctaagtaataaactttaccgcccttggttattgagatgacgcccaatgtttgcttttgaatgacttcatgtgtataataaaagtgagtgtggtcataggtctcttgtttgtctgggcggggtttaagggtatataagtttctcggggctaaacttggttacacttgaccccaatggaggcgtgggggtgcttggaggagtttgcggacgtgcgccgtttgctggacgagagctctagcaatacctatagtatttggaggtatctgtggggctctactcaggccaagttggtcttcagaattaagcaggattacaagtgcgattttgaagagctttttagttcctgtggtgagcttttgcaatccttgaatctgggccaccaggctatcttccaggaaaaggttctctcgactttggatttttccactcccgggcgcaccgccgcttgtgtggcttttgtgtcttttgtgcaagataaatggagcggggagacccacctgagtcacggctacgtgctggatttcatggcgatggctctttggagggcttacaacaaatggaagattcagaaggaactgtacggttccgccctacgtcgtccacttctgcagcggcaggggctgatgtttcccgaccatcgccagcatcagaatctggaagacgagcgagcggagaagatcagcttgagagccggcctggaccctcctcaggaggaatgaatctcccgcaggtggttgagctgtttcccgaactgagacgggtcctgactatcagggaggatggtcagtttgtgaagaagctgaagagggatcggggtgagggagatgatgaggcggctagcaatttagcttttagtctgataactcgccaccgaccggaatgtattacctatcagcagattaaggagagttgtgccaacgagctggatcttttgggtcagaagtatagcatagaacagcttaccacttactggcttcagcccggggatgattgggaagaggcgattagggtgtatgcaaaggtggccctgcggcccgattgcaagtataagattactaagttggttaatattagaaactgctgctatatttctggaaacggggccgaagtggagatagatactgaggacagggtggctattaggtgttgcatgataaacatgtggcccgggatactggggatggatggggtgatatttatgaatgtgaggttcacgggccccaactttaatggtacggtgttcatgggcaacaccaacttgctcctgcatggtgcgagtttctatgggtttaacaacacctgtatagaggcctggaccgatgtaaaggttcgaggttgttccttttatagctgttggaaggcggtggtgtgtcgccctaaaagcaggggttctgtgaagaaatgcttgtttgaaaggtgcaccctaggtatcctttctgagggcaactccagggtgcgccataatgtggcttcgaactgcggttgcttcatgcaagtgaagggggtgagcgttatcaagcataactcggtctgtggaaactgcgaggatcgcgcctctcagatgctgacctgctttgatggcaactgtcacctgttgaagaccattcatataagcagtcaccccagaaaggcctggcccgtgtttgagcataacattctgacccgctgttccttgcatctgggggtcaggaggggtatgttcctgccttaccagtgtaactttagccacactaaaatcctgctggaacccgagtgcatgactaaggtcagcctgaatggtgtgtttgatgtgagtctgaagatttggaaggtgctgaggtatgatgagaccaggaccaggtgccgaccctgcgagtgcggcggcaagcacatgagaaatcagcctgtgatgttggatgtgaccgaggagcttaggcctgaccatctggtgctggcctgcaccagggccgagtttgggtctagcgatgaggataccgattgaggtgggtaaggtgggcgtggctagcagggtgggcgtgtataaattgggggtctaaggggtctctctgtttgtcttgcaacagccgccgccatgagcgacaccggcaacagctttgatggaagcatctttagtccctatctgacagtgcgcatgcctcactgggccggagtgcgtcagaatgtgatgggttccaacgtggatggacgtcccgttctgccttcaaattcgtctactatggcctacgcgaccgtgggaggaactccgctggacgccgcgacctccgccgccgcctccgccgccgccgcgaccgcgcgcagcatggctacggacctttacagctctttggtggcgagcagcgcggcctctcgcgcgtctgctcgggatgagaaactgactgctctgctgcttaaactggaagacttgacccgggagctgggtcaactgacccagcaggtttccagcttgcgtgagagcagccttgcctccccctaatggcccataatataaataaaagccagtctgtttggattaagcaagtgtatgttctttatttaactctccgcgcgcggtaagcccgggaccagcggtctcggtcgtttagggtgcggtggattttttccaacacgtggtacaggtggctctggatgtttagatacatgggcatgagtccatccctggggtggaggtagcaccactgcagagcttcgtgctcgggggtggtgttgtatatgatccagtcgtagcaggagcgctgggcgtggtgctgaaaaatgtccttaagcaagaggcttatagctagggggaggcccttggtgtaagtgtttacaaatctgcttagctgggaggggtgcatccggggggatatgatgtgcatcttggactggatttttaggttggctatgttcccgcccagatcccttctgggattcatgttgtgcaggaccaccagcacggtatatccagtgcacttgggaaatttatcgtggagcttagacgggaatgcatggaagaacttggagacgcccttgtggcctcccagattttccatacattcgtccatgatgatggcaatgggcccgtgggaagctgcctgagcaaaaacgtttctggcatcgctcacatcgtagttatgttccagggtgaggtcatcataggacatctttacgaatcgggggcgaagggtcccggactgggggatgatggtaccctcgggccccggggcgtagttcccctcacagatctgcatctcccaggctttcatttcagagggagggatcatatccacctgcggggcgatgaaaaagacagtttctggcgcaggggagattaactgggatgagagcaggtttctgagcagctgtgactttccacagccggtgggcccatatatcacgcctatcaccggctgcagctggtagttaagagagctgcagctgccgtcctcccggagcaggggggccacctcgttgagcatatccctgacgtggatgttctccctgaccagttccgccagaaggcgctcgccgcccagcgaaagcagctcttgcaaggaagcaaaatttttcagcggtttcaggccatcggccgtgggcatgtttttcagcgtctgggtcagcagctccagcctgtcccagagctcggtgatgtgctctacggcatctcgatccagcagatctcctcgtttcgcgggttggggcggctttcgctgtagggcaccagccgatgggcgtccagcggggccagagtcatgtccttccatgggcgcagggtcctcgtcagggtggtctgggtcacggtgaaggggtgcgctccgggttgggcactggccagggtgcgcttgaggctggttctgctggtgctgaatcgctgccgctcttcgccctgcgcgtcggccaggtagcatttgaccatggtctcgtagtcgagaccctcggcggcgtgccccttggcgcggagctttcccttggaggtggcgccgcacgaggggcactgcaggctcttcagggcgtagagcttgggagcgagaaacacggactctggggagtaggcgtccgcgccgcaggccgagcagaccgtctcgcattccaccagccaagtgagttccgggcggtcagggtcaaaaaccaggttgcccccatgctttttgatgcgtttcttaccttggctctccatgaggcggtgtcccttctcggtgacgaagaggctgtccgtgtccccgtagaccgacttcaggggcctgtcttccagcggagtgcctctgtcctcctcgtagagaaactctgaccactctgagacgaaggcccgcgtccaggccaggacgaaggaggccacgtgggaggggtagcggtcgttgtccactagcgggtccaccttctccagggtgtgcaggcacatgtccccctcctccgcgtccagaaaagtgattggcttgtaggtgtaggacacgtgaccgggggttcccaacgggggggtataaaagggggtgggtgccctttcatcttcactctcttccgcatcgctgtctgcgagagccagctgctggggtaagtattccctctcgaaggcgggcatgacctcagcgctcaggttgtcagtttctaaaaatgaggaggatttgatgttcacctgtccggaggtgatacctttgagggtacctgggtccatctggtcagaaaacactatttttttgttatcaagcttggtggcgaatgacccgtagagggcgttggagagcagcttggcgatggagcgcagggtctggtttttgtcgcggtcggctcgctccttggccgcgatgttgagttgcacgtactcgcgggccacgcacttccactcggggaacacggtggtgcgctcgtctgggatcaggcgcaccctccagccgcggttgtgcagggtgaccatgtcgacgctggtggcgacctcaccgcgcagacgctcgttggtccagcagaggcggccgcccttgcgcgagcagaaggggggtagggggtccagctggtcctcgtttggggggtccgcgtcgatggtaaagaccccggggagcaggcgcgggtcaaagtagtcgatcttgcaagcttgcatgtccagagcccgctgccattcgcgggcggcgagcgcgcgctcgtaggggttgaggggcgggccccagggcatggggtgggtgagcgcggaggcgtacatgccgcagatgtcatacacgtacaggggttccctgaggataccgaggtaggtggggtagcagcgccccccgcggatgctggcgcgcacgtagtcatagagctcgtgggagggggccagcatgttgggcccgaggttggtgcgctgggggcgctcggcgcggaagacgatctgcctgaagatggcgtgggagttggaggagatggtgggccgctggaagacgttgaagcttgcttcttgcaagcccacggagtccctgacgaaggaggcgtaggactcgcgcagcttgtgcaccagctcggcggtgacctggacgtcgagcgcacagtagtcgagggtctcgcggatgatgtcatacctatcctcccccttctttttccacagctcgcggttgaggacgaactcttcgcggtctttccagtactcttggaggggaaacccgtccgtgtccgaacggtaagagcctagcatgtagaactggttgacggcctggtaggggcagcagcccttctccacgggcagcgcgtaggcctgcgccgccttgcggagggaggtgtgggtgagggcgaaagtgtccctgaccatgactttgaggtattgatgtctgaagtctgtgtcatcgcagccgccctgttcccacagggtgtagtccgtgcgctttttggagcgcgggttgggcagggagaaggtgaggtcattgaagaggatcttccccgctcgaggcatgaagtttctggtgatgcgaaagggccctgggaccgaggagcggttgttgatgacctgggcggccaggacgatctcgtcaaagccgtttatgttgtgtcccacgatgtagagctccaggaagcggggctggcccttgatggaggggagctttttaagttcctcgtaggtaagctcctcgggcgattccaggccgtgctcctccagggcccagtcttgcaagtgagggttggccgccaggaaggatcgccagaggtcgcgggccatgagggtctgcaggcggtcgcggaaggttctgaactgccgccccacggccattttttcgggggtgatgcagtagaaggtgagggggtctttctcccaggggtcccatctgagctctcgggcgaggtcgcgcgcggcagcgaccagagcctcgtcgccccccagtttcatgaccagcatgaagggcacgagttgcttgccaaaggctcccatccaagtgtaggtttctacatcgtaggtgacaaagaggcgctccgtgcgaggatgagagccgattgggaagaactggatctcccgccaccagttggaggattggctgttgatgtggtgaaagtagaagtcccgtctgcgggccgagcactcgtgctggcttttgtaaaagcgaccgcagtactggcagcgctgcacgggttgtatatcttgcacgaggtgaacctggcgacctctgacgaggaagcgcagcgggaatctaagtcccccgcctggggtcccgtgtggctggtggtcttttactttggttgtctggccgccagcatctgtctcctggagggcgatggtggaacagaccaccacgccgcgagagccgcaggtccagatctcggcgctcggcgggcggagtttgatgacgacatcgcgcacattggagctgtccatggtctccagctcccgcggcggcaggtcagccgggagttcctggaggttcacctcgcagagacgggtcaaggcgcggacagtgttgagatggtatctgatttcaaggggcatgttggaggcggagtcgatggcttgcaggaggccgcagccccggggggccacgatggttccccgcggggcgcgaggggaggcggaagctgggggtgtgttcagaagcggtgacgcgggcgggcccccggaggtagggggggttccggccccacaggcatgggcggcaggggcacgtcttcgccgcgcgcgggcaggggctggtgctggctccgaagagcgcttgcgtgcgcgacgacgcgacggttggtgtcctgtatctggcgcctctgagtgaagaccacgggtcccgtgaccttgaacctgaaagagagttcgacagaatcaatctcggcatcgttgacagcggcctggcgcaggatctcctgcacgtcgcccgagttgtcctggtaggcgatttctgccatgaactgctcgatctcttcctcctggagatctcctcgtccggcgcgctccacggtggccgccaggtcgttggagatgcgacccatgagctgcgagaaggcgttgagtccgccctcgttccagacccggctgtagaccacgcccccctcggcgtcgcgggcgcgcatgaccacctgggccaggttgagctccacgtgtcgcgtgaagacggcgtagttgcgcaggcgctggaaaaggtagttcagggtggtggcggtgtgctcggcgacgaagaagtacatgacccagcgccgcaacgtggattcattgatgtcccccaaggcctccaggcgctccatggcctcgtagaagtccacggcgaagttgaaaaactgggagttgcgagcggacacggtcaactcctcctccagaagacggatgagctcggcgacagtgtcgcgcacctcgcgctcgaaggccacggggggcgcttcttcctcttccacctcttcttccatgattgcttcttcttcttcctcagccgggacgggagggggcggcggcgggggaggggcgcggcggcggcggcggcgcaccgggaggcggtcgatgaagcgctcgatcatctccccccgcatgcggcgcatggtctcggtgacggcgcggccgttctcccgggggcgcagctcgaagacgccgcctctcatttcgccgcggggcgggcggccgtgaggtagcgagacggcgctgactatgcatcttaacaattgctgtgtaggtacgccgccaagggacctgattgagtccagatccaccggatccgaaaacctttggaggaaagcgtctatccagtcgcagtcgcaaggtaggctgagcaccgtggcgggcgggggcgggtcgggagagttcctggcggagatgctgctgatgatgtaattaaagtaggcggtcttgagaaggcggatggtggacaggagcaccatgtctttgggtccggcctgttggatgcggaggcggtcggccatgccccaggcctcgttctgacaccggcgcaggtctttgtagtaatcttgcatgagtctttccaccggcacttcttctccttcctcttcttcatctcgccggtggtttctcgcgccgcccatgcgcgtgaccccaaagcccctgagcggctgcagcagggccaggtcggcgaccacgcgctcggccaagatggcctgctgtacctgagtgagggtcctctcgaagtcatccatgtccacgaagcggtggtaggcacccgtgttgatggtgtaggtgcagttggccatgacggaccagttgacggtctggtgtcccggctgcgagagctccgtgtaccgcaggcgcgagaaggcgcgggaatcgaacacgtagtcgttgcaagtccgcaccagatactggtagcccaccaggaagtgcggcggaggttggcgatagaggggccagcgctgggtggcgggggcgccgggcgccaggtcttccagcatgaggcggtggtatccgtagatgtacctggacatccaggtgatgcctgcggcggtggtggtggcgcgcgcgtagtcgcggacccggttccagatgtttcgcaggggcgagaagtgttccatggtcggcacgctctggccggtgaggcgcgcgcagtcgttgacgctctatacacacacaaaaacgaaagcgtttacagggctttcgttctgtagcctggaggaaagtaaatgggttgggttgcggtgtgccccggttcgagaccaagctgagctcagccggctgaagccgcagctaacgtggtattggcagtcccgtctcgacccaggccctgtatcctccaggatacggtcgagagcccttttgctttcttggccaagcgcccgtggcgcgatctgggatagatggtcgcgatgagaggacaaaagcggctcgcttccgtagtctggagaaacaatcgccagggttgcgttgcggcgtaccccggttcgagcccctatggcggcttggatcggccggaaccgcggctaacgtgggctgtggcagccccgtcctcaggaccccgccagccgacttctccagttacgggagcgagccccttttgtttttttattttttagatgcatcccgtgctgcggcagatgcgcccctcgccccggcccgatcagcagcagcaacagcaggcatgcagacccccctctcctctccccgccccggtcaccacggccgcggcggccgtgtccggtgcggggggcgcgctggagtcagatgagccaccgcggcggcgacctaggcagtatctggacttggaagagggcgagggactggcgcggctgggggcgagctctccagagcgccacccgcgggtgcagttgaaaagggacgcgcgtgaggcgtacctgccgcggcaaaacctgtttcgcgaccgcgggggcgaggagcccgaggagatgcgggactgcaggttccaagcggggcgcgagctgcgccgcggcttggacagacagcgcctgctgcgcgaggaggactttgagcccgacacgcagacgggcatcagccccgcgcgcgcgcacgtggccgcggccgacctggtgaccgcctacgagcagacggtgaaccaggagcgcaacttccaaaaaagcttcaacaaccacgtgcgcacgctggtggcgcgcgaggaggtgaccctgggtctcatgcatctgtgggacctggtggaggcgatcgtgcagaaccccagcagcaagcccctgaccgcgcagctgttcctggtggtgcagcacagcagggacaacgaggccttcagggaggcgctgctgaacatcaccgagccggaggggcgctggctcctggacctgataaacatcctgcagagcatagtggtgcaggagcgcagcctgagcctggccgagaaggtggcggccattaactattctatgctgagcctgggcaagttctacgctcgcaagatctacaagaccccctacgtgcccatagacaaggaggtgaagatagacagcttctacatgcgcatggcgctgaaggtgctaaccctgagcgacgacctgggagtgtaccgcaacgagcgcatccacaaggccgtgagcgccagccggcggcgcgagctgagcgaccgcgaactgatgcacagtctgcagcgcgcgctgaccggcgcgggcgagggcgacagggaggtcgagtcctactttgacatgggggccgacctgcactggcagccgagccgccgcgccctggaagcggcgggggcgtacggcggccccctggcggccgatgacgaggaagaggaggactatgagctagaggagggcgagtacctggaggactgacctggctggtggtgttttggtatagatgcaagatccgaacgtggcggacccggcggtccgggcggcgctgcagagccagccgtccggcattaactcctctgacgactgggccgcggccatgggtcgcatcatggccctgaccgcgcgcaaccccgaggccttcaggcagcagcctcaggctaaccggctggcggccatcttggaagcggtagtgcccgcgcgctccaaccccacccacgagaaggtgctggccatagtcaacgcgctggcggagagcagggccatccgggcagacgaggccggactggtgtacgatgcgctgctgcagcgggtggcgcggtacaacagcggcaacgtgcagaccaacctggaccgcctggtgacggacgtgcgcgaggccgtggcgcagcgcgagcgcttgcatcaggacggcaacctgggctcgctggtggcgctaaacgccttccttagcacccagccggccaacgtaccgcgggggcaggaggactacaccaacttcttgagcgcgctgcggctgatggtgaccgaggtccctcagagcgaggtgtaccagtcggggcccgactacttcttccagaccagcagacagggcttgcaaaccgtgaacctgagccaggctttcaagaacctgcgggggctgtggggagtgaaggcgcccaccggcgaccgggctacggtgtccagcctgctaacccccaactcgcgcctgctgctgctgctgatcgcgcccttcacggacagcgggagcgtctcgcgggagacctatctgggccacctgctgacgctgtaccgcgaggccatcgggcaggcgcaggtggacgagcacaccttccaggagatcaccagcgtgagccacgcgctggggcaggaggacacgggcagcctgcaggcgaccctgaactacctgctgaccaacaggcggcagaagattcccacgctgcacagcctgacccaggaggaggagcgcatcttgcgctacgtgcagcagagcgtgagcctgaacctgatgcgcgacggcgtgacgcccagcgtggcgctggacatgaccgcgcgcaacatggaaccgggcatgtacgcttcccagcggccgttcatcaaccgcctgatggactacttgcatcgggcggcggccgtgaaccccgagtacttcaccaatgccattctgaatccccactggatgccccctccgggtttctacaacggggacttcgaggtgcctgaggtcaacgatgggttcctctgggatgacatggatgacagtgtgttctcccccaacccgctgcgcgccgcgtctctgcgattgaaggagggctctgacagggaaggaccaaggagtctggcctcctccctggctctgggggcggtgggcgccacgggcgcggcggcgcggggcagcagccccttccccagcctggcggactctctgaatagcgggcgggtgagcaggccccgcttgctaggcgaggaggagtatctgaacaactccctgctgcagcccgtgagggacaaaaacgctcagcggcagcagtttcccaacaatgggatagagagcctggtggacaagatgtccagatggaagacgtatgcgcaggagtacaaggagtgggaggaccgccagccgcggcccctgccgccccctagacagcgctggcagcggcgcgcgtccaaccgccgctggaggcaggggcccgaggacgatgatgactctgcagatgacagcagcgtgttggacctgggcgggagcgggaaccccttttcgcacctgcgcccacgcctgggcaagatgttttaaaagagaaaaataaaaactcaccaaggccatggcgacgagcgttggttttttgttcccttccttagtatgcggcgcgcggcgatgttcgaggaggggcctcccccctcttacgagagcgcgatgggaatttctcctgcggcgcccctgcagcctccctacgtgcctcctcggtacctgcaacctacaggggggagaaatagcatctgttactctgagctgcagcccctgtacgataccaccagactgtacctggtggacaacaagtccgcggacgtggcctccctgaactaccagaacgaccacagcgattttttgaccacggtgatccaaaacaacgacttcaccccaaccgaggccagtacccagaccataaacctggacaacaggtcgaactggggcggcgacctgaagactatcctgcacaccaatatgcccaacgtgaacgagttcatgttcaccaactcttttaaggcgcgggtgatggtggcgcgcgagcagggggaggcgaagtacgagtgggtggacttcacgctgcccgagggcaactactcagagaccatgactctcgacctgatgaacaatgcgatcgtggaacactatctgaaagtgggcaggcagaacggggtgaaggagagcgatatcggggtcaagtttgacaccagaaacttccgtctgggctgggaccctgtgaccgggctggtcatgccgggggtctacaccaacgaggcctttcatcccgatatagtgctcctgcccggctgtggggtggacttcacccagagccggctgagcaacctgctgggcgttcgcaagcggcaacctttccaggagggtttcaagatcacctatgaggatctggaggggggcaacattcccgcgctccttgatctggacgcctacgaggagagcttgaaacccgaggagagcgctggcgacagcggcgagagtggcgaggagcaagccggcggcggcggcagcgcgtcggtagaaaacgaaagtactcccgcagtggcggcggacgctgcggaggtcgagccggaggccatgcagcaggacgcagaggagggcgcgcaggaggacatgaacaatggggagatcaggggcgacactttcgccacccggggcgaagaaaaagaggcagaggcggcggcggcgacggcggaagccgaaaccgaggcagaggcagagcccgagaccgaagttatggaagacatgaatgatggagaacgtaggggtgacacgtttgccacccggggcgaagagaaggcggcggaggcagaagccgcggctgaggaggcggctgcggctgcggccaaggctgaggctgcggctgaggctaaggtcgaagccgatgttgcggttgaggctcaggctgaggaggaggcggcggctgaagcagttaaggaaaaggcccaggcagagcaggaagagaaaaaacctgtcattcaacctctaaaagaagatagcaaaaagcgcagttacaacgtcattgagggcagcacctttacccaataccgcagctggtacctggcttacaactacggcgacccggtcaagggggtgcgctcgtggaccctgctctgcacgccggacgtcacctgcggctccgagcagatgtactggtcgctgccaaacatgatgcaagacccggtgaccttccgttccacgcggcaggttagcaactttccggtggtgggcgccgaactgctgccagtacactccaagagtttttacaacgagcaggccgtctactcccagctgatccgccaggccacctctctgacccacgtgttcaatcgctttcccgagaaccagattttggcgcgcccgccggcccccaccatcaccaccgtcagtgaaaacgttcctgccctcacagatcacgggacgctaccgctgcgcaacagcatctcaggagtccagcgagtgaccattactgacgccagacgccggacctgcccctacgtttacaaggccttgggcatagtctcgccgcgcgtcctctccagtcgcactttttaaaacacatccacccacacgctccaaaatcatgtccgtactcatctcgcccagcaacaacaccggctgggggctgcgcgcacccagcaagatgtttggaggggcaaggaagcgctccgaccagcaccccgtgcgcgtgcgcggccactaccgcgcgccctggggtgcgcacaagcgcgggcgcacagggcgcaccactgtggatgatgtcattgactccgtagtggagcaggcgcgccactacacacccggcgcgccgaccgcctccgccgtgtccaccgtggaccaggcgatcgaaagcgtggtacagggggcgcggcactatgccaaccttaaaagtcgccgccgccgcgtggcgcgccgccatcgccggagaccccgggctactgccgccgcgcgccttaccaaggctctgctcaagcgcgccaggcgaactggccaccgggccgccatgagggccgcacggcgggctgccgctgccgcgagcgccgtggccccgcgggcacgaaggcgcgcggccgctgccgccgccgccgccatttccagcttggcctcgacgcggcgcggtaacatatactgggtgcgcgactcggtgagcggcacacgtgtgcccgtgcgctttcgccccccacggaattagcacaagacaacatacacactgagtctcctgctgttgtgtatcccagcggcgaccgtcagcagcggcgacatgtccaagcgcaaaattaaagaagagatgctccaggtcatcgcgccggagatctatgggcccccgaagaaggaggaggaggattacaagccccgcaagctaaagcgggtcaaaaagaaaaagaaagatgatgacgttgacgaggcggtggagtttgtccgccgcatggcgcccaggcgccctgtgcagtggaagggtcggcgcgtgcagcgagtcctgcgccccggcaccgcggtggtctttacgcccggcgagcgttccacgcgcactttcaagcgggtgtacgatgaggtgtacggcgacgaggatctgttggagcaggccaaccatcgatttggggagtttgcatatgggaaacggcctcgcgagagtctaaaagaggacctgctggcgctaccgctggacgagggcaatcccaccccgagtctgaagccggtgaccctgcaacaggtgctgcctttgagcgcgcccagcgagcagaagcgagggttaaagcgcgagggcggggacctggcacccaccgtgcagttgatggtgcccaagcggcagaagctggaggacgtgctggagaaaatgaaagtagagcccgggatccagcccgagatcaaggtccgccctatcaagcaggtggcgcccggcgtgggagtccagaccgtggacgttaggattcccacggaggagatggaaacccaaaccgccactccctcttcggcagcaagcgccaccaccggcgccgcttcggtagaggtgcagacggacccctggctacccgccgccactatcgccgtcgccgccgccccccgttcgcgcggacgcaagagaaattatccagcggccagcgcgcttatgccccagtatgcgctgcatccatccatcgcgcccacccccggctaccgcgggtactcgtaccgcccgcgcagatcagccggcactcgcggccgccgccgccgtgcgaccacaaccagccgccgccgtcgccgccgccgccagccagtgctgacccccgtgtctgtaaggaaggtggctcgctcggggagcacgctggtggtgcccagagcgcgctaccaccccagcatcgtttaaagccggtctctgtatggttcttgcagatatggccctcacttgtcgccttcgcttcccggtgccgggataccgaggaagaactcaccgccgcaggggcatggcgggcagcggtctccgcggcggccgtcgccatcgccggcgcgcaaagagcaggcgcatgcgcggcggtgtgttgcccctgctggtcccgctactcgccgcggcgatcggcgccgtgcccgggatcgcctccgtggccctgcaggcgtcccagaaacattgactcttgcaaccttgcaagcttgcatttttggaggaaaaaataaaaaagtctagactctcacgctcgcttggtcctgtgactattttgtagaaaaaagatggaagacatcaactttgcgtcgctggccccgcgtcacggctcgcgcccgttcatgggagactggacagatatcggcaccagcaatatgagcggtggcgccttcagctggggcagtctgtggagcggccttaaaaattttggttccaccattaagaactatggcaacaaagcgtggaacagcagcacgggtcagatgctgagagacaagttgaaagagcagaacttccaggagaaggtggcgcagggcctggcctctggcatcagcggggtggtggacatagctaaccaggccgtgcagaaaaagataaacagtcatctggacccccgccctcaggtggaggaaacgcctccagccatggagacggtgtctcccgagggcaaaggcgaaaagcgcccgcggcccgacagggaagagaccctggtgtcacacaccgaggagccgccctcttacgaggaggcagtcaaggccggcctgcccaccactcgccccatagctcccatggccaccggtgtggtgggtcacaggcaacacacccccgcaacactagatctgcccccgccgtccgagccgactcgccagccaaaggcggtgacggtgtccgctccctccacttccgccgccaacagagtgcctctgcgccgcgctgcgagcggcccccgggcctcgcgagtcagcggcaactggcagagcacactgaacagcatcgtgggcctgggagtgaggagtgtgaagcgccgccgttgctactgaatgagcaagctagctaacgtgttgtatgtgtgtatgcgtcctatgtcgccgccagaggagctgttgagccgccggcgccgtctgcactccagcgaatttcaagatggcgaccccatcgatgatgcctcagtggtcgtacatgcacatctcgggccaggacgcttcggagtacctgagccccgggctggtgcagttcgcccgcgccacagacacctacttcaacatgagtaacaagttcaggaaccccactgtggcgcccacccacgatgtgaccacggaccggtcgcagcgcctgacgctgcggttcatccccgtggatcgggaggacaccgcttactcttacaaggcgcggttcacgctggccgtgggcgacaaccgcgtgctggacatggcctccacttactttgacatccggggggtgctggacaggggccccacttttaagccctactcgggcactgcctacaaccccctggcccccaagggcgcccccaattcttgtgagtgggaacaagaggaaaatcaggtggtcgctgcagatgatgaacttgaagatgaagaagcgcaagcacaagaggaagcccctgtgaaaaaaattcatgtatatgctcaggcgcctctttctggcgaaaagatttccaaggatggtatccaaataggtactgaagtcgtaggagatacatctaaggacacttttgcagataaaacattccaacccgaacctcagataggcgagtctcagtggaacgaggctgatgccacagcagcaggaggtagagttttgaaaaagactacccctatgagaccttgctatggatcctatgccaggcctaccaatgccaacgggggtcaaggaattatggttgccaatgaacaaggagtgttggagtctaaagtagaaatgcaatttttctctaacaccacaacccttaatgcgcgggatggaaccggcaatcccgaaccaaaggtggtgttgtacagcgaagatgtccacttggaatctcccgatactcatctgtcttacaagcccaaaaaggatgatgttaatgccaaaatcatgttgggtcagcaagccatgcccaacagacccaacctcattggatttagagataatttcattgggcttatgttttacaacagcaccggtaacatgggagtgctggcgggtcaggcctctcagttgaatgctgtggtggacttgcaggatagaaacacagaactgtcatatcagcttctgcttgattcaattggggatagaaccagatacttctccatgtggaaccaggcagtggatagctatgatccagatgtcagaattattgaaaaccatgggactgaggatgaactgcccaactactgcttccctttgggcggcataggagttactgatacttatcaagggataaaaaataccaatggcaatggtcagtggaccaaagatgatcagttcgcggaccgcaacgaaataggggtgggaaacaacttcgccatggagatcaacatccaggccaacctttggagaaacttcctctatgcaaacgtggggctctacctgccagacaagctcaagtacaaccccaccaacgtggacatctctgacaaccccaacacctatgactacatgaacaagcgggtggtggcccctggcctggtggactgctttgtcaatgtgggagccaggtggtccctggactacatggacaacgtcaaccccttcaaccaccaccgcaatgcgggtctgcgctaccgctccatgatcctgggcaacgggcgctatgtgccctttcacatccaggtaccccagaagttctttgccatcaagaacctcctgctcctgcccggctcctacacctacgagtggaacttcaggaaggatgtgaacatggtcctacagagctctctgggcaatgaccttagggtggatggggccagcatcaagtttgacagcatcaccctctatgctacatttttccccatggcccacaacaccgcctccacgcttgaggccatgctgagaaacgacaccaacgaccagtcctttaatgactacctctctggggccaacatgctctacccaatcccagccaaggccaccaacgtgcccatctccatcccctctcgcaactgggccgcctttagaggctgggcctttacccgccttaagaccaaggagaccccctccctgggctcgggttttgatccctactttgtttactcgggatccatcccctacctggatggcaccttctacctcaaccacactttcaagaagatatccatcatgtatgactcctccgtcagctggccgggcaacgaccgcttgctcacccccaatgagttcgaggtcaagcgcgccgtggacggcgagggctacaacgtggcccagtgcaacatgaccaaggactggttcctggtgcagatgctggccaactacaacataggctaccagggcttttacatcccagagagctacaaggacaggatgtactccttcttcagaaatttccaacccatgagccgacaggtggtggacgagaccaattacaaggactatcaagccattggcatcacccaccagcacaacaactcgggtttcgtgggctacctggcgcccaccatgcgcgagggtcaggcctaccccgccaacttcccctaccccttgataggcaagaccgcggtcgacagcgtcacccagaaaaagttcctctgcgaccgcaccctctggcgcatccccttctctagcaacttcatgtccatgggtgcgctcacggacctgggccaaaacctgctttatgccaactctgcccatgcgctggacatgacttttgaggtggaccccatggacgagcccacccttctctatattgtgtttgaagtgttcgacgtggtcagagtgcaccagccgcaccgcggtgtcatcgagaccgtgtacctgcgtacgcccttctcagccggcaacgccaccacctaaggagacagcgccgccgccgcctgcatgacgggttccaccgagcaagagctcagggccattgccagagacctgggatgcggaccctattttttgggcacctatgacaaacgcttcccgggctttatctcccgagacaagctcgcctgcgccattgtcaacacggccgcgcgcgagaccgggggcgtgcactggctggcctttggctgggacccgcgctccaaaacttgctacctctttgacccctttggcttctccgatcagcgcctcaggcagatttatgagtttgagtacgaggggctgctgcgccgcagcgcgctcgcctcctcgcccgaccgctgcatcacccttgagaagtccaccgaaaccgtgcaggggccccactcggccgcctgcggtctcttctgttgcatgtttttgcacgcctttgtgcactggcctcagagtcccatggattgcaaccccaccatgaacttgctaaagggagtgcccaacgccatgctccagagcccccaggtccagcccaccctgcgccgcaaccaggaacagctttaccgcttcctggagcgccactccccctacttccgcagccacagcgcgcgcatccggggggccacctctttttgccacttgcaagaaaacatgcaagacggaaaatgatgtacagcatgcttttaataaatgtaaagactgtgcactttaattatacacgggctctttctggttatttattcaacaccgccgtcgccatttagaaatcgaaagggttctgccgtgcgtcgccgtgcgccacgggcagagacacgttgcgatactggaagcggctcgcccacttgaactcgggcaccaccatgcggggcagtggttcctcggggaagttctcgctccacagggtgcgggtcagctgcagcgcgctcaggaggtcgggagccgagatcttgaagtcgcagttggggccggaaccctgcgcgcgcgagttgcggtacacggggttgcagcactggaacaccagcagggccggattattcacgctggccagcaggctctcgtcgctgatcatgtcgctgtccagatcctccgcgttgctcagggcgaatggggtcatcttgcagacctgcctgcccaggaaaggcgggagcccaggcttgccgttgcagtcgcagcgcaggggcattagcaggtgcccacggcccgactgcgcctgcgggtacaacgcgcgcatgaaggcttcgatctgcctaaaagccacctgggtcttggctccctccgaaaagaacatcccacaggacttgctggagaactggttcgcgggacagctggcatcgtgcaggcagcagcgcgcgtcagtgttggcaatctgcaccacgttgcgaccccaccggtttttcactatcttggccttggaagcctgctcctttagcgcgcgctggccgttctcgctggtcacatccatctctatcacctgttccttgttgatcatgtttgtcccgtgcagacactttaggtcgccctccgtctgggtgcagcggtgctcccacagcgcgcaaccggtgggctcccaattcttgtgggtcacccccgcgtaggcctgcaggtaggcctgcaggaagcgccccatcatggtcataaaggtcttctggctcgtaaaggtcagctgcaggccgcgatgctcttcgttcagccaggtcttgcagatggcggccagcgcctcggtctgctcgggcagcatcttaaaatttgtcttcaggtcgttatccacgtggtacttgtccatcatggcacgcgccgcctccatgcccttctcccaggcggacaccatgggcaggcttagggggtttatcacttccagcggcgaggacaccgtactttcgatttcttcttcctccccctcttcccggcgcgcgcccccgctgttgcgcgctcttaccgcctgcaccaaggggtcgtcttcaggcaagcgccgcaccgagcgcttgccgcccttgacctgcttgatcagtaccggcgggttgctgaagcccaccatggtcagcgccgcctgctcttcttcgtcttcgctgtctaccactatttctggggaggggcttctccgctctgcggcaaaggcggcggatcgcttcttttttttcttgggagccgccgcgatggagtccgccacggcgaccgaggtcgagggcgtggggctgggggtgcgcggtaccagggcctcgtcgccctcggactcttcctctgactccaggcggcggcggagtcgcttctttgggggcgcgcgcgtcagcggcggcggagacggggacggggacggggacgggacgccctccacagggggtggtcttcgcgcagacccgcggccgcgctcgggggtcttctcgcgctggtcttggtcccgactggccattgtatcctcctcctcctaggcagagagacataaggagtctatcatgcaagtcgagaaggaggagagcttaaccaccccctcagagaccgccgatgcgcccgccgtcgccgtcgcccccgctaccgccgacgcgcccgccacaccgagcgacacccccacggacccccccgccgacgcacccctgttcgaggaagcggccgtggagcaggacccgggctttgtctcggcagaggaggatttgcaagaggaggagaataaggaggagaagccctcagtgccaaaagatcataaagagcaagacgagcacgacgcagacgcacaccagggtgaagtcgggcggggggacggagggcatggcggcgccgactacctagacgaaggaaacgacgtgctcttgaagcacctgcatcgtcagtgcgccatcgtctgcgacgctctgcaggagcgcagcgaggtgcccctcagcgtggcggaggtcagccgcgcctacgagctcagcctcttttccccccgggtgcccccccgccgccgcgaaaacggcacatgcgagcccaacccgcgcctcaacttctaccccgcctttgtggtgcccgaggtcctggccacctatcacatcttctttcaaaattgcaagatccccatctcgtgccgcgccaaccgtagccgcgccgataagatgctggccctgcgccagggcgaccacatacctgatatcgccgctttggaagatgtgccaaagatcttcgagggtctggggcgcaacgagaagcgggcagcaaactctctgcaacaggaaaacagcgaaaatgagagtcacactggagcgctggtggagctggagggcgacaacgcccgcctggcggtgctcaagcgcagcatcgaggtcacccactttgcctaccccgcgctcaacctgccccccaaagtcatgaacgcggtcatggacgggctgatcatgcgccgcggccggcccctcgctccagatgcaaacttgcatgaggagaccgaggacggtcagcccgtggtcagcgacgagcagctgacgcgctggctggagagcgcggaccccgccgaactggaggagcggcgcaagatgatgatggccgcggtgctggtcaccgtagagctggagtgtctgcagcgcttcttcggtgaccccgagatgcagagaaaggtcgaggagaccctacactacaccttccgccagggctacgtgcgccaggcttgcaagatctccaacgtggagctcagcaacctggtgtcctacctgggcatcttgcatgaaaaccgccttgggcagagcgtgctacactccaccctgcgcggggaggcgcgccgcgactacgtgcgcgactgcgtttacctcttcctctgctacacctggcagacggccatgggggtctggcagcagtgcctggaggagcgcaacctcaaggagctggagaagcttctgcagcgcgcgctcaaagacctctggacgggcttcaacgagcgctcggtggccgccgcgctagccgacctcatcttccccgagcgcctgctcaaaaccctccagcaggggctgcccgacttcaccagccaaagcatgttgcaaaattttaggaactttatcctggagcgttctggcatcctacccgccacctgctgcgccctgcccagcgactttgtccccctcgtgtaccgcgagtgccccccgccgctgtggggccactgctacctgttccaactggccaactacctgtcctaccacgcggacctcatggaggactccagcggcgaggggctcatggagtgccactgccgctgcaacctctgcacgccccaccgctccctggtctgcaacacccaactgctcagcgagagtcagattatcggtaccttcgagctacagggtccgtcctcctcagacgagaagtccgcggctccggggctaaaactcactccggggctgtggacttccgcctacctgcgcaaatttgtacctgaagactaccacgcccacgaaatcaggttttacgaggaccaatcccgcccgcccaaggcggagctgaccgcctgcgtcatcacccagggcgagatcctaggccaattgcaagccatccaaaaagcccgccaagagtttttgctgaagaggggtcggggggtgtatctggacccccagtcgggtgaggagctcaacccggttcccccgctgccaccgccgcgggaccttgcttcccaggataagcatcgccatggctcccagaaagaagcagcagcggccgccgctgccgccgccccacatgctggaggaagaggaggaatactgggacagtcaggcagaggaggtttcggacgaggaggagccggagacggagatggaagagtgggaggaggacagcttagacgaggaggcttccgaagccgaagaggcaggcgcaacaccgtcaccctcggccgcagccccctcgcaggcgcccccgaagtccgctcccagcatcagcagcaacagcagcgctataacctccgctcctccaccgccgcgacccacggccgaccgcagacccaaccgtagatgggacaccaccggaaccggggccggtaagtcctccgggagaggcaagcaagcgcagcgccaaggctaccgctcgtggcgcgctcacaagaacgccatagtcgcttgcttgcaagactgcggggggaacatctccttcgcccgccgcttcctgctcttccaccacggtgtggccttcccccgtaacgtcctgcattactaccgtcatctctacagcccctactgcggcggcagtgagccagaggcggccagcggcggcggcgcccgtttcggtgcctaggaagacccagggcaagacttcagccaagaaactcgcggcgaccgcggcgaacgcggtcgcgggggccctgcgcctgacggtgaacgaacccctgtcgacccgcgaactgaggaaccgaatcttccccactctctatgccatcttccagcagagcagagggcaggatcaggaactgaaagtaaaaaacaggtctctgcgctccctcacccgcagctgtctgtatcacaagagcgaagaccagcttcggcgcacgctggaggacgctgaggcactcttcagcaaatactgcgcgctcactcttaaggactagctccgcgcccttctcgaatttaggcgggaacgcctacgtcatcgcagcgccgccgtcatgagcaaggacattcccacgccatacatgtggagctatcagccgcagatgggactcgcggcgggcgcctcccaagactactccacccgcatgaactggctcagtgccggcccacacatgatctcacaggttaatgacatccgcacccatcgaaaccaaatattggtgaagcaggcggcaattaccaccacgccccgcaataatcccaaccccagggagtggcccgcgtccctggtgtatcaggaaattcccggccccaccaccgtactacttccgcgtgattcccaggccgaagtccaaatgactaactcaggggcacagctcgcgggcggctgtcgtcacagggtgcggcctcctcgccagggtataactcacctggagatccgaggcagaggtattcagctcaacgacgagtcggtgagctcctcgctcggtctcagacctgacgggaccttccagatagccggagccggccgatcttccttcacgccccgccaggcgtacctgactctgcagagctcgtcctcggcgccgcgctcgggcggcatcgggactctccagttcgtgcaggagtttgtgccctcggtctacttcaaccccttctcgggctctcccggtcgctacccggaccagtttatcccgaactttgacgccgcgagggactcggtggacggctacgactgaatgtcgggtggacccggtgcagagcaacttcgcctgaagcaccttgaccactgccgccgccctcagtgctttgcccgctgtcagaccggtgagttccagtacttttccctgcccgactcgcacccggacggcccggcgcacggggtgcgctttttcatcccgagtcaggtccgctctaccctaatcagggagttcaccgcccgtcccctactggcggagttggaaaaggggccttctatcctaaccattgcctgcatttgctctaaccctggattacaccaagatctttgctgtcatttgtgtgctgagtataataaaggctgagatcagaatctactcgggctcctgtcgccatcctgtcaacgccaccgtccaagcccggcccgatcagcccgaggtgaacctcacctgtggtctgcaccggcgcctgaggaaatacctagcttggtactacaacagcactccctttgtggtttacaacagctttgaccaggacggggtctcactgagggataacctctcgaacctgagctactccatcaggaagaacaacaccctcgagctacttcctccttacctgcccgggacttaccagtgtgtcaccggcccctgcacccacacccacctgttgatcgtaaacgactctcttccgagaacagacctcaataactcctctccgcagttccccagaacaggaggtgagctcaggaaaccccgggtaaagaagggtggacaagagttaacacttgtggggtttctggtatatgtgacgctggtggtggctcttttgattaaggcttttccttccatgtctgaactatccctcttcttttatgaacaactcgactagtgctaacgggaccctacccaacgaatcgggattgaatatcggtaaccaggttgcagtttcacttttgattaccttcatagtcctcttcctgctagtgctgtcgcttctgtgcctgcggatcgggggctgctgcatccacgtttatatctggtgctggctgtttagaaggttcggagaccaccgcaggtagaataatgctgcttaccctctttgtcctggcgctggctgccagctgccaagccttttccgaggctgacttcatagagccccagtgcaatatcacttataaatctgaacgtgccatctgtactattctaatcaaatgtgttactcaacacgataaggtgactgttaaatacaaagatcaattaaaaaaagacgcactttacagcagctggcaaccaggagatgatcaaaaatacaatgtaaccgtcttccagggcaaactctccaaaacttacaattacaatttcccatttgagcagatgtgtgactttgtcatgtacatggaaaagcagtacaagctgtggcctccaactccccagggctgtgtggaaaatccaggctctttctgtatgatctctctctgtgtaactgtgctggcactaatactcacgcttctgtatctcagatttaaatcaaggcaaagcttcattgatgaaaagaaaatgccataatcgctcaacgcttgattgctaacaccgggtttttatccgcagaatgattggaatcaccctactaatcacctccctccttgcgattgcccatgggttggaacgaatcgaagtccctgtgggggccaatgttaccctggtggggcctgtcggcaatgctacattaatgtgggaaaaatatactaaaaatcaatgggtttcttactgcactaacaaaaacagccacaagcccagagccatctgcgatgggcaaaatctaaccttgattgatgttcaattgctggatgcgggctactattatgggcagctgggtacaatgattaattactggagaccccacagagattacatgcttcacgtagtaaagggtcccattagcagcccaaccaccacctctaccacacccactaccaccactactcccaccaccagcactgccgcccagcctcctcatagcagaacaaccacttttatcaattccaagtcccactccccccacattgccggcgggccctccgcctcagactccgagaccaccgagatctgcttctgcaaatgctctgacgccattgcccaggatttggaagatcacgaggaagatgagcatgactacgcagatgcatgccaggcatcagaggcagaagcgctaccggtggccctaaaacagtatgcagactcccacaccacccccaaccttcctccaccttcccagaagccaagtttcctgggggaaaatgaaactctgcctctttccatactagctctgacatctgttgctattttggccgctctgctggtgcttctatgctctatatgctacctgatctgctgcagaaagaaaaaatctcacggccatgctcaccagcccctcatgcacttcccttaccctccagagctgggcgaccacaaactttaagtctgcagtagctatctgcccatcccttgtcagtcgacagcgatgagccccactaatctaacagcctctggacttacaacattgtctcttaatgagaccaccgctcctcaagacctgtacgatggtgtctccgcgctggttaaccagtgggatcacctgggcatatggtggctcctcataggagcagtgaccctgtgcctaatcctggtctggatcatctgctgcatcaaaagcagaagacccaggcggcggcccatctacaggcccttcgtcatcacacctgaagataatgatgatgatgacaccacctccaggctgcagagcctaaagcagctactcttctcttttacagcatggtaaattgaatcatgccccgcattttcatctacttgcttctccttccactttttctgggctcctctacattggccactgtgtcccacatcgaggtagactgcctcacgcccttcacagtctacctgcttttcggctttgtcatctgcacctttgtctgcagcgttatcactgtagtgatctgcttcatacagtgcatcgactacatctgtgtgcgggtggcctactttagacaccacccccagtatcgcaacagggacatagcggctctcctaagacttgtttaaatcatggccaaattacctgtgattggtcttctgattatctgctgcgtcctagccgcgattgggactcaacctaataccaccaccagcgctcccagaaagagacatgtatcctgcagcttcaagcgtccctggaatataccccaatgctttactgatgaacctgaaatctctttggcttggtacttcagcgtcaccgcccttctcatcttctgcagtacggttattgctcttgccatctacccttcccttaacctgggctggaatgctgtcaactctatggaatatcccaccttcccagaaccagacctgccagacctggttgttctaaacgcgtttcctcctcctccagttcaaaatcagtttcgccctccgtcccctacgcccactgaggtcagctactttaatctaacaggcggagatgactgaaaacctagacctagaaatggacggtctctgcagcgagcaacgcacactagagaggcgccggcaaaaagcagagctcgagcgtcttaaacaagagctccaagacgccgtggccatacaccagtgcaaaaaagggctcttctgtctggtaaaacaggccacgctcacctatgaaaaaacaggtgacacccaccgcctaggatacaagctgcccacacagcgccaaaagtttgcccttatgataggtgaacaacccatcaccgtcacccagcactccgtggagacagaaggctgcattcatgctccctgcaggggcgctgactgcctctacaccttgatcaaaaccctctgcggtctcagagaccttatccctttcaattgatcataactgtaatcaataaaaaatcacttacttgaaatctgatagcaagactctgtccaattttttcagcaacacttccttcccctcctcccaactctggtactctaggcgcctcctagctgcaaacttcctccacagtctgaagggaatgtcagattcctcctcctgtccctccgcacccacgatcttcatgttgttacagatgaaacgcgcgagatcgtctgacgagaccttcaaccccgtgtacccctacgataccgagatcgctccgacttctgtccctttccttacccctccctttgtatcatccgcaggaatgcaagaaaatccagctggggtgctgtccctgcacctgtcagagccccttaccacccacaatggggccctgactctaaaaatggggggcggcctgaccctggacaaggaagggaatctcacttcccaaaacatcaccagtgtcgatccccctctcaaaaaaagcaagaacaacatcagccttcagaccgccgcacccctcgccgtcagctccggggccctaaccctttttgccactccccccctagcggtcagtggcgacaaccttactgtgcagtctcaggcccctcttactttggaagactcaaaactaactctggccaccaaaggacccctaactgtgtccgaaggcaaacttgtcctagaaacagagcctcccctgcatgcaagtgacagcagtagcctgggccttagcgtcacggccccacttagcattaacaatgacagcctaggactagacatgcaagcgcccatcagctctcgagatggaaaactggctctaacagtggcggcccccctaactgtggccgagggtatcaatgctttggcagtagccacaggtaatggtattggactaaatgaaaccaacacacacctgcaggcaaaactggtcgcgcccctaggctttgataccaacggcaacattaagctaagcgtcgcaggaggcatgaggctaaacaataacacactgatactagatgtaaactacccatttgaggctcaaggccaactgagcctaagagtgggctcgggcccactatatgtagattctagtagtcataacctaaccattagatgccttaggggattgtatgtaacatcttctaacaaccaaaacggtctagaggccaacattaaactaacaaaaggccttgtgtatgacggaaatgccatagcagttaatgttggcaaagggctggaatacagccctactggcacaacagaaaaacctatacagactaaaataggtctaggcatggagtatgacactgagggagccatgatgacaaaactaggctctggactaagctttgacaattcaggagccattgtggtgggaaacaaaaatgatgacaggcttactttgtggaccacaccggacccatcgcccaactgtcagatttactctgaaaaagatgctaaactaaccttggtactgactaaatgtggcagtcaggttgtaggcacagtatctattgccgctcttaaaggtagccttgtgccaatcactagtgcaatcagtgtggttcagatatacctaaggtttgatgaaaatggggtgctgatgagtaactcttcacttaatggcgaatactggaattttagaaacggagactcaactaatggcacaccatatacaaacgcagtgggttttatgcctaatctactggcctatcctaaaggtcaaactacaactgcaaaaagtaacattgtcagccaggtctacatgaacggggacgatactaaacccatgacatttacaatcaacttcaatggccttagtgaaacaggggatacccctgtcagtaaatattccatgacattctcatggaggtggccaaatggaagctacatagggcacaattttgtaacaaactcctttactttctcctacatcgcccaagaataaagaaagcacagagatgcttgtttttgatttcaaaattgtgtgcttttatttattttcaagcttacagtatttccagtagtcattagaatagagcttaattaaactgcatgagaacccttccacatagcttaaattatcaccagtgcaaatggaaaaaaatcaacatacctttttatccagatatcaaagaactctagtggtcagttttcccccaccctcccagctcacagaatacacagtcctttccccccggctggctttaaacaacactatctcattggtaacagacatatttttaggtgtaataatccacacggtctcttggcgggccaaacgctggtctgtgatgttaataaactccccaggcagctctttcaagttcacgtcgctgtccaactgctgaagcgctcgcggctccgactgcgcctctagcggaggcaacggcagcacccgatccttgatctataaaggagtagagtcataatcccccataagaatagggcggtgatgcagcaacaaggcgcgcagcaactcctgccgccgcctctccgtacgacaggaatgcaacggggtggtggtctcctccgcgataatccgcaccgctcgcagcatcagcatcctcgtcctccgggcacagcagcgcatcctgatctcactgagatcggcgcagtaagtgcagcacaacaccaagatgttatttaagatcccacagtgcaaagcactgtacccaaagctcatggcgggaaggacagcccccacgtgaccatcgtaccagatcctcaggtaaatcaaatgacgacctctcataaacacgctggacatatacatcacctccttgggcatgagctgattcaccacctctcgataccacaggcatcgctgattaattaaagacccctcgagcaccatcctgaaccaggaagccagcacctgaccccccgccaggcactgcagggaccccggtgaatcgcagtggcagtgaagactccagcgctcgtagccgtgaaccatagagctggtcattatatccacattggcacaacacagacacactttcatacactttttcatgattagcagctcctctctagtcaagaccatatcccaaggaatcacccactcttgaatcaaggtaaatcccacacagcagggcaggcctctcacataactcacgttatgcatagtgagcgtgtcgcaatctggaaataccggatgatcttccatcaccgaagcccgggtctccgtctcaaagggaggtaaacggtccctcgtgtagggacagtggcgggataatcgagatcgtgttgaacgtagagtcatgccaaagggaacagcggacgtactcatatttcctccagcagaaccaagtgcgcgcgtggcagctatccctgcgtcttctgtctcgccgcctgccccgctcggtgtagtagttgtaatacagccactccctcagaccgtcaaggcgctccctggcgtccggatctataacaacaccgtcctgcagcgccgccctgatgacatccaccaccgtagagtatgccaagcccagccacgaaatgcactcactttgacagcgagagataggaggagcgggaagagatggaagaaccatgatagtaaaagaacttttattccaatcgatcctctacaatgtcaaagtgtagatctatcagatggcactggtctcctccgctgagtcgatcaaaaataacagctaaaccacaaacaacacgattggtcaaatgctgcacaagggcttgcagcataaaatcgcctcgaaagtccaccgcaagcataacatcaaagccaccgcccctatcatgatctatgataaaaaccccacagctatccaccagacccatatagttttcatctctccatcgtgaaaaaatatttacaagctcctcctttaaatcacctccaaccaattcaaaaagttgagccagaccgccctccaccttcattttcagcatgcgcatcatgattgcaaaaattcaggctcctcagacacctgtataagattgagaagcggaacgttaacatcaatgtttcgctcgcgaagatcgcgcctcagtgcaagcatgatataatcccacaggtcggagcggatcagcgaggacatctccccgccaggaaccaactcaacggagcctatgctgattataatacgcatattcggggctatgctaaccagcacggcccccaaataggcgtactgcataggcggcgacaaaaagtgaacagtttgggttaaaaaatcaggcaaacactcgcgcaaaaaagcaagaacatcataaccatgctcatgcaaatagatgcaagtaagctcaggaacgaccacagaaaaatgcacaatttttctctcaaacatgactgcgagccctgcaaaaaataaaaaagaaacattacacaagagtagcctgtcttacaatgggatagactactctaaccaacataagacgggccacgacatcgcccgcgtggccataaaaaaaattatccgtgtgattaaaaagaagcacagatagctggccagtcatatccggagtcatcacgtgcgaacccgtgtagacccccgggttggacacatcggccaaacaaagaaagcggccaatgtatcccggaggaatgataacactaagacgaagatacaacagaataaccccatgggggggaataacaaagttagtaggtgaataaaaacgataaacacccgaaactccctcctgcgtaggcaaaatagcgccctccccttccaaaacaacatacagcgcttccacagcagccatgacaaaagactcaaaacactcaaaagactcagtcttaccaggaaaataaaagcactctcacagcaccagcactaatcagagtgtgaagagggccaagtgccgaacgagtatatataggaattaaaaatgacgtaaatgtgtaaaggtcaaaaaacgcccagaaaaatacacagaccaacgcccgaaacgaaaacccgcgaaaaaatacccagaagttcctcaacaaccgccacttccgctttcccacgatacgtcacttcctcaaaaatagcaaactacatttcccacatgtacaaaaccaaaacccctccccttgtcaccgcccacaacttacataatcacaaacgtcaaagcctacgtcacccgccccgcctcgccccgcccacctcattatcatattggcctcaatccaaaataaggtatattattgatgatg
